(19) United States
(12) Patent Application Publication
(10) Pub. No.: US 2024/0376156 A1
(43) Pub. Date: Nov. 14, 2024

(54) MULTIPLE DE NOVO DESIGNED PROTEIN BINDING PROTEINS

(71) Applicant: UNIVERSITY OF WASHINGTON, Seattle, WA (US)

(72) Inventors: Lansing Joseph STEWART, Seattle, WA (US); David BAKER, Seattle, WA (US); Longxing CAO, Seattle, WA (US); Brian COVENTRY, Seattle, WA (US); Inna GORESHNIK, Seattle, WA (US); Buwei HUANG, Seattle, WA (US); Nathaniel BENNETT, Seattle, WA (US); Eva-Maria STRAUCH, Seattle, WA (US); Thomas SCHLICHTHAERLE, Seattle, WA (US)

(21) Appl. No.: 18/576,518

(22) PCT Filed: Jul. 11, 2022
(86) PCT No.: PCT/US2022/073590

§ 371 Date: Jan. 4, 2024

Related U.S. Application Data
(60) Provisional application No. 63/221,327, filed on Jul. 13, 2021.

(51) Int. Cl. C07K 14/00; A61K 38/00; C12N 15/70

(52) U.S. Cl. CPC C07K 14/00; C12N 15/70; A61K 38/00

(57) ABSTRACT

Designed polypeptides that bind specifically to a defined protein target are provided, as well as methods for their design and use.

### CROSS REFERENCE

[0001] This application claims priority to U.S. Provisional Patent Application Ser. No. 63/221,327 filed Jul. 13, 2021, incorporate by reference herein in its entirety.

### FEDERAL FUNDING STATEMENT

[0002] This invention was made with government support under Grant No. FA8750-17-C-0219, awarded by the Defense Advanced Research Projects Agency and Grant No. HDTRA1-16-C-0029, awarded by the Defense Threat Reduction Agency and Grant Nos. HHSN272201700059C and R01 AG063845, awarded by the National Institutes of Health. The government has certain rights in the invention.

### SEQUENCE LISTING STATEMENT

[0003] A computer readable form of the Sequence Listing is filed with this application by electronic submission and is incorporated into this application by reference in its entirety. The Sequence Listing is contained in the file created on Jul. 4, 2022 having the file name “21-0753-WO_SeqList.hml” and is 1,981 kb in size.

### BACKGROUND

[0004] Protein interactions play critical roles in biology, and general approaches to disrupt or modulate these with designed proteins would have huge impact. While empirical laboratory selection approaches starting from very large antibody, DARPIN or other protein scaffold libraries can generate binders to protein targets, it is difficult at the outset to target a specific region on a target protein surface, and to sample the full space of possible binding modes. Computational methods can target specific target surface locations and provide a more principled and potentially much faster approach to binder generation than random library selection methods, as well as insight into the fundamental properties of protein interfaces (which must be understood for design to be successful). Most current methods for designing proteins to bind to a target surface utilize information derived from native complex structures on specific sidechain interactions or protein backbone placements optimal for binding. For many target proteins, there are no obvious pockets or clefts on the protein surface into which a small number of privileged sidechains can be placed, and guidance by a small number of hotspot residues limits the approach to a small fraction of possible interaction modes.

### SUMMARY

[0005] In one aspect, the disclosure provides polypeptides comprising an amino acid sequence at least 35/u, 40%, 45%, 50%, 55%, 60%, 65%, 70%, 75%, 80%, 85%, 90%, 91%, 92%, 93%, 94%, 95%, 96%, 97%, 98%, 99%, or 100% identical to the amino acid sequence selected from the group consisting of SEQ ID NO:1-1559 and 1561-1570, not including any functional domains added fused to the polypeptides (whether N-terminal, C-terminal, or internal), and wherein the 1, 2, 3, 4, or 5 N-terminal and/or C-terminal amino acid residues may be present or absent when considering the percent identity. In another embodiment, substitutions relative to the reference polypeptide are selected from the residues listed as “best” or “tolerable” at each position immediately below the reference polypeptide listed in Tables 13A-13HHH. In a further embodiment, substitutions relative to the reference polypeptide are selected from the residues listed as “best” or “tolerable” at each position immediately below the reference polypeptide listed in Tables 13A-13HHH. In one embodiment, 1, 2, 3, 4, 5, 6, 7, 8, 9, 10, 11, 12, 13, 14, 15, or all interface residues are as defined in the reference polypeptide listed in Tables 13A-13HHH. In another embodiment, protein core residues listed in Tables 13A-13HHH are substituted relative to the reference polypeptide only with conservative amino acid substitutions. In a further embodiment, insertion of amino acid residues relative to the reference polypeptide occurs at a residue indicated in the column “loop/insertion” column of Tables 13A-13HHH. In another embodiment, 1, 2, 3, 4, or 5 N-terminal and/or C-terminal amino acid residues are not included when determining the percent identity relative to the reference polypeptide. In one embodiment, all residues are included when determining the percent identity relative to the reference polypeptide.

[0006] In another embodiment, the disclosure provides fusion proteins comprising the polypeptide of any embodiment disclosed herein fused to a functional polypeptide. In a further embodiment, the disclosure provides fusion proteins comprising two or more copies of the polypeptide of any embodiment disclosed herein. In one embodiment, the two or more copies of the polypeptide are identical; in another embodiment, the two or more copies of the polypeptide are not all identical.

[0007] In further embodiments, the disclosure provides scaffold comprising 2, 3, 4, 5, 6, 7, 8, 9, 10, 11, 12, 13, 14, 15, 16, 17, 18, 19, 20, or more copies of the polypeptide or fusion protein of any embodiment disclosed herein; nucleic acids encoding the polypeptide or fusion protein of any embodiment disclosed herein; expression vectors comprising the nucleic acid of any embodiment disclosed herein operatively linked to a suitable control sequence: host cells comprising the polypeptide, fusion protein, scaffold, nucleic acid, and/or expression vector of any embodiment disclosed herein; pharmaceutical compositions comprising: (a) the polypeptide, fusion protein, scaffold, nucleic acid, expression vector, and/or host cell of any embodiment disclosed herein; and (b) a pharmaceutically acceptable carrier; and uses of or methods for using the polypeptide, fusion protein, scaffold, nucleic acid, expression vector, host, and/or pharmaceutical composition of any embodiment disclosed herein for any suitable use as disclosed herein.

### DESCRIPTION OF THE FIGURES

[0008] FIG. 1(a-b). Overview of the de novo protein binder design pipeline. (a) The two stage de novo binder design approach. In the global search stage, billions of disembodied amino acids are docked onto the selected targeting region and the positioning of the scaffolds is guided by the favorable sidechain interactions. The interface sequences are then designed to maximize interaction with the target. In the focused search stage, the interface motifs are extracted, clustered. The privileged motifs are then selected to guide another round of docking and design. Designs are then selected for experimental characterization based on computational metrics. (b) The distribution of the top 1% of binders based on Rosetta™ ddg and contact molecular surface after pooling equal-CPU-time dock-and-design trajectories for each of the 13 target sites and averaging per-target distributions. The top 30 PatchDock™ outputs for the 1,000 helical scaffolds tested were designed using the RosettaScripts™ protocol. RifDock™ seeded with PatchDock™ outputs generated 300 outputs per scaffold which were trimmed to a total of 19,500 docks with “The Predictor” and subsequently designed. The top 150 RifDock™ outputs per scaffold were trimmed to 9,750, designed, and 300 motifs were extracted. The motifs were grafted into the scaffold set to produce 150,000 docks, which were trimmed to 9,750, designed, and combined with the earlier 9,750.

[0009] FIG. 2(a-d). De novo design of miniprotein binders to 13 target sites. (a) the 12 natural protein targets are shown as surface and their associated interacting partners in the native crystal structures are shown as cartoons. The PDB ID codes for the crystal structures that are used to generate the figures (a) are 3ZTJ (H3), 2IFG (TrkA), IDJS (FGFR2), 1MOX (EGFR), 3MJG (PDGFR), 4OGA (Insulin®), 5U8R (IGFIR), 2GY7 (Tie2), 3DI3 (IL-7Rα), 1XIW (CD3δ), 3KFD (TGF-β) and 4O3V (VirB8). The same structures are used for design, except for H3 (PDB: 4FNK), TrkA (PDB: 1WWW), FGFR2 (PDB: IEV2), EGFR (PDB: 1MOX, 4UV7) and InsulinR (PDB: 4ZXB). (b) High-resolution sequence mapping of the de novo designed miniprotein binders. The scaffold core residues and the interface core residues are well conserved while the non-interface surface positions are more tolerant to mutations, which indicates that the design models are largely correct. (c) Binding of the optimized designs with the corresponding targets in the biolayer interferometry experiments. Two-fold serial dilutions were tested for each binder and the highest concentration is labeled. For H3, TrkA, FGFR2, EGFR, PDGFR, IL-7Rα, CD3δ, TGF-β and VirB8, the biotinylated target proteins were loaded onto the Streptavidin (SA) biosensors, and the miniprotein binders were tested as the analytes for association and dissociation. The binding affinities of the miniprotein binders for InsulinR, IGF1R and Tie2 are weak and different experimental setups were used. For IGF1R and Tie2, the biotinylated targets were loaded onto the SA biosensors and the MBP— (mannose binding protein) tagged miniprotein binders were used as the analytes. For InsulinR, the miniprotein binder was immobilized onto the Amine Reactive Second-Generation (AR2G) Biosensors and the insulin receptor was used as the analyte. (d) Circular dichroism spectra at different temperatures (25° C., 95° C., 25° C. after melt) and (insert) CD signal at 222-nm wavelength as a function of temperature for the optimized designs.

[0010] FIG. 3(a-b). Designed binders have high target specificity. (a) Biolayer interferometry assay was used to characterize the cross reactivity of each miniprotein binder with each target protein. The biotinylated target proteins were loaded onto SA sensors and allowed to equilibrate before setting the baseline to zero. The BLI tips were then placed into 100 nM of the binders for 300 seconds. The tips were then placed into the buffer solution and the dissociation was monitored for an additional 600 seconds. The maximum response signal for each binder-target pair was normalized by the maximum response signal of the designed binder-target pair. The normalized values were used to plot the heatmap. The binding signals for the other target-binder pairs were too low to be determined at 100 nM and they were not included in the cross-reactivity assay. (b) Surface shape and electrostatic properties of the designed binders. The electrostatic potential surface of the de novo designed binders. The interface regions are shown for each binder. The electrostatic potential surfaces were generated with the APBS Electrostatics plugin in Pymol™.

[0011] FIG. 4(a-e). Ability of Rosetta™ to predict mutational effects. These graphs shows the observed experimental effect of each mutation versus Rosetta™ expected effect. For each plotted point, the delta refers to the effect versus the parent SSM design; therefore a “Beneficial” mutation is one that would improve affinity relative to the original designed protein the SSM was based on. The ΔExperimental ddg is derived from FACS data using the SC₅₀ values (see Methods). Confidence intervals were collapsed to their center point to make this graph and “No effect” refers to mutations with less than a 1 kcal/mol change. Binder region definitions: (a) Interface Core: residue contacts target protein and has no SASA (Solvent Accessible Surface Area) in bound state; (b) Interface Boundary: residue contacts target protein, but does have SASA: (c) Monomer Core: residue has no SASA and does not contact target; (d) Monomer Boundary: residue has intermediate SASA and does not contact target; (e) Monomer Surface: residue has full SASA and does not contact target. See Methods SSM Validation for further explanation.

[0012] FIG. 5(a-f). Mutations observed in SSM experiments that improved affinity bind at least 1 kcal/mol graphed by relative frequency. Plotted is the #_times_Native_to_Mutant_improved_affinity/#_times_Native_to_Mutant_tested_in SSMs. A value of 0.10 with x-axis F and y-axis W could therefore represent that for 2 of 20 times W was substituted for Y, the affinity improved. Separated bars on each axis represent pooled data for the entire row/column. Only SSM designs with a validation score of 0.005 or better were considered. While some cells are clipped, none extended beyond 0.25. Binder region definitions: (a) Interface Core: residue contacts target protein and has no SASA in bound state; (b) Interface Boundary: residue contacts target protein, but does have SASA: (c) Monomer Core: residue has no SASA and does not contact target; (d) Monomer Boundary: residue has intermediate SASA and does not contact target: (e) Monomer Surface: residue has full SASA and does not contact target; (f) All ((a-e) combined).

[0013] FIG. 6(a-e). Competition experiments indicated the miniprotein binders bound to the targeted region. Yeast cells displaying the TrkA binder (a), InsulinR binder (b), IGF1R binder (c), PDGFR binder (d) and Tie2 binder (e) were incubated with the target protein in the presence or absence of the native ligand as the competitor, and target protein binding to cells (y axis) was monitored with flow cytometry.

[0014] FIG. 7(a-b) Experimental characterization of the influenza hemagglutinin (HA) binder. The FI6v3 antibody competes with the binder for binding to the influenza A H1 hemagglutinin (a) and influenza A H3 hemagglutinin (b). Yeast cells displaying the H3 binder were incubated with 10 nM H1 or H3 in the presence or absence of 2 μM F16v3 antibody, and hemagglutinin binding to cells (y axis) was monitored with flow cytometry.

[0015] FIG. 8. Target success rate versus hydrophobicity. The y-axis shows what percentage of tested binders against the indicated target showed SC₅₀ below 4 μM. The x-axis shows the hydrophobicity of the target region in SAP units. A greater Asap score indicates greater hydrophobicity. The trend is striking and can be used to estimate the difficulty of potential future targets. The Δsap_score can be calculated on the target structure alone by observing the SAP score of all residues a potential binder would cover.

### DETAILED DESCRIPTION

[0016] All references cited are herein incorporated by reference in their entirety. Within this application, unless otherwise stated, the techniques utilized may be found in any of several well-known references such as: Molecular Cloning: A Laboratory Manual (Sambrook, et al., 1989, Cold Spring Harbor Laboratory Press), Gene Expression Technology (Methods in Enzymology, Vol. 185, edited by D. Goeddel, 1991. Academic Press, San Diego, CA), “Guide to Protein Purification” in Methods in Enzymology (M. P. Deutshcer, ed., (1990) Academic Press, Inc.); PCR Protocols: A Guide to Methods and Applications (Innis, et al. 1990. Academic Press, San Diego, CA), Culture of Animal Cells: A Manual of Basic Technique, 2nd Ed. (R. I. Freshney. 1987. Liss, Inc. New York, NY), Gene Transfer and Expression Protocols, pp. 109-128, ed. E. J. Murray, The Humana Press Inc., Clifton, N.J.), and the Ambion 1998 Catalog (Ambion, Austin, TX).

[0017] As used herein, the singular forms “a”, “an” and “the” include plural referents unless the context clearly dictates otherwise.

[0018] As used herein, the amino acid residues are abbreviated as follows: alanine (Ala; A), asparagine (Asn: N), aspartic acid (Asp; D), arginine (Arg: R), cysteine (Cys: C), glutamic acid (Glu: E), glutamine (Gln; Q), glycine (Gly: G), histidine (His; H), isoleucine (Ile: I), leucine (Leu; L), lysine (Lys; K), methionine (Met; M), phenylalanine (Phe; F), proline (Pro; P), serine (Ser; S), threonine (Thr; T), tryptophan (Trp: W), tyrosine (Tyr; Y), and valine (Val; V).

[0019] In all embodiments of polypeptides disclosed herein, any N-terminal methionine residues are optional (i.e.: the N-terminal methionine residue may be present or may be deleted).

[0020] All embodiments of any aspect of the disclosure can be used in combination, unless the context clearly dictates otherwise.

[0021] Unless the context clearly requires otherwise, throughout the description and the claims, the words ‘comprise’, ‘comprising’, and the like are to be construed in an inclusive sense as opposed to an exclusive or exhaustive sense: that is to say, in the sense of “including, but not limited to”. Words using the singular or plural number also include the plural and singular number, respectively %. Additionally, the words “wherein,” “above,” and “below” and words of similar import, when used in this application, shall refer to this application as a whole and not to any particular portions of the application.

[0022] In a first aspect, the disclosure provides polypeptides comprising an amino acid sequence at least 35%, 40%, 45% 50%, 55%, 60%, 65%, 70%, 75%, 80%, 85%, 90%, 91%, 92%, 93%, 94%, 95%, 96%, 97%, 98%, 99%, or 100% identical to the amino acid sequence of any one of SEQ ID NO: 1-1559, not including any functional domains added fused to the polypeptides (whether N-terminal, C-terminal, or internal), and wherein the 1, 2, 3, 4, or 5 N-terminal and/or C-terminal amino acid residues may be present or absent when considering the percent identity.

[0023] The reference pol-peptide sequences are provided in Tables 1-12. The polypeptides of the disclosure bind specifically to a defined protein target, including binding proteins for a diverse set of different protein targets, as detailed herein. Biophysical characterization demonstrates that exemplary binders tested are hyperstable and bind their targets with nanomolar to picomolar affinities.

TABLE 1
CD3d binding polypeptides

| SEQ | |
|---|---|
| ID | |
| NO | Sequence of target binding polypeptide |
| 1 | NHIACEIHNPEAAKEIAKVANVRRVFVIKQP |
| | GNRYFVLLKDADPEGVKKVASKYNARCVIRE |
| 141 | NHIACEIHNPEAAKEIAKVANVRRVYFIKQP |
| | GNRYFVLLKNADPEGVKKVRSKYNVRCVIRE |

TABLE 2
EGFR binding polypeptides

| SEQ | |
|---|---|
| ID | Sequence of target binding |
| NO | polypeptide |
| 2 | SDELFSKVELKVTELSMIVMNAKTEDEKKTA |
| | LTKIKQIADKVQDEELSKFVKRALEHVKKEV |
| | G |
| 3 | SPDEAKKLLQEAEKLARKQNDRMELAYVEFL |
| | KHVLENAKRLNDKRAVESVRELARDALEELQ |
| | S |
| 142 | SLDEAKKLLQEAEKLARKINDRMELAYVEFL |
| | KHILETAKKQNDKRTIESVRDMARDALEELQ |
| | S |
| 4 | SLEEVKELIRKLVPDPRLVWALEDLLELLKK |
| | GDPLAEEVLRFYLASAREQGDKDETKATELV |
| | LKT |
| 5 | DDESLKLLLILVQIQLALERGEISNDQAKEL |
| | AKRVEEKARKLGDEQVQRNVENVKEVIERFG |
| 6 | DHWEEVERWALELLQEATEQNDPTKAKKILE |
| | EAHKLLRRELSEEEARAVVRYLKQLVDRELS |
| 143 | DHWEEVERWALEHLQEATQQNDPQKAKKILE |
| | EAHKWERRELSEEEARAVVRWLKQLVDRELS |
| 7 | DEAAEEVLRYLKKLGDPELAELIERLLERVR |
| | KKKDPDLERTLEIIAVAVLYGDPEIARQALR |
| | ALH |
| 8 | DELRELINDAQNKNDPELLKKVLELIEELIR |
| | RGDPSYQEIVLLLLFVADLLGDPEITRLAEE |
| | LLK |
| 9 | SELSEEALRLLEEGNPRDAEHVLIDLLFELE |
| | NRGDKELSELVLEILELLIRGDPDEARKLIK |
| | ELT |
| 10 | PLEEVKKVVEEALKDDPELVRAVKTIIEAVK |
| | KGENDPIFLELLLRLLIETFGDPRLREALEL |
| | VRK |
| 11 | SDEERRELEERLERAVREGDEHHLRFLSQRL |
| | ILLWWIAGKLDREEARKYVEELIKELKKRV |
| 12 | DLEEEAEKLVKEAEKYARSVDDPAAKMHVHL |
| | VKLRLKLAKERISDKEKILRFVKEQVDLVKE |
| | T |
| 13 | DRHVADLIQHLLERGVPPEEILELIEDYIRW |
| | TGNPREKKALELLEKLTRELGDPEEALRLFV |
| | ERG |
| 14 | SPEDAEKLIKTIKTIAKKRNDRMELAYVKFL |
| | ESSLKQAQRYNDEERIEDITELLEDALKEIQ |
| | S |
| 15 | DYTVDLAIKFVEEVVKELKNDPDPRSQKLAE |
| | ELERLIRKAKNAEDPNKKHTLVHKAFDIAVQ |
| | AM |
| 16 | DEEQETRLKLLLLLVQLQHLAKKDPDTAETE |
| | IDKIYKLAKKLGDETIRENAENAKRIVQELK |
| 17 | SEEALKIFLAILRIQLHYERGEISPETAIRL |
| | LQKLIKRAEELGDEDVKRLAKRLLEKIRKEK |
| 18 | DIDQLIETLIKLLKKLSKKYPEFKFHARYAI |
| | ERANRIRKSDPRNSRAAVSLLEQALERIQKQ |
| | A |
| 19 | DYFFHSTRTYRGDGAEERAEKEAKEIVRKIA |
| | ETIARKLNAKRVTLQVIVVRRGDLILISLLF |
| | LIR |
| 1561 | DHWEEVERNALEHLQEATQQNDPQKAKKILE |
| EGFRn | EAHKKERRELSEEEARSVVRWLKQLVDREKS |
| 1562 | SLDEAKKLLQEAEKLARKLNDRTELAYVEFL |
| EGFRC | KHSLETAKKQNDKRTIESVRDMARDALEELQ |
| | S |

TABLE 3
FGFR2 binding polypeptides

| SEQ | |
|---|---|
| ID | |
| NO | Sequence of target binding polypeptide |
| 20 | SEELIKKALELLRQGNPDRAAQVLLFLAFQTGDPR |
| | VRELFSLLVEAMQKNDPELLKRVRRLLEET |
| 21 | LEKLERVALLAVRLYMRIGDPEIAKIWFKVMELLH |
| | AYQAGHLDEEEAKRRADKLEKELRKEI |
| 22 | DPSKELDKVYRTAFKRITSIPDKEKQKEVVKEATE |
| | LLRRIAKDEEEKKLASLISLFLKTES |
| 144 | DRRKEMDKVYRTAFKRITSTPDKEKRKEVVKEATE |
| | QLRRIAKDEEEKKKAAYMILELKTLG |
| 23 | DKKELSDTAEKLLKDALDKNDDSKFISAVFFALKV |
| | AKDVNDERLERIVVKLYNEFMNRYH |
| 24 | DYERVISRAIELALKKGDEKALHILNEIFFAAHRG |
| | ELDPTEAERLARRIEKKERS |
| 25 | DLREKLQELWWRALEKGNEKAERLALRAFMGAWHG |
| | DTSEEEAKKIITEVERLIKS |
| 26 | SEIHKKLARLLSKAIQKGDRKANHIVIRAAMAYEK |
| | GLIDPDQARKLAEKAERILRS |
| 27 | DIEHLLARAIHRSAQLGDREAVELLTRIFFALEAG |
| | KVSEEWAERLARTI LEHQRN |
| 28 | SIVERVIEQVEKRGLPPEALVLTVWLALVKAGDPE |
| | KARLVEELAREVFEGKLPPEELKRLLREIE |
| 29 | DEVHHFLLRLFFKDPDDEDVERILALFLLLKKEGI |
| | PPEEVTEIVIKFAEKLGNPELAKELKKILK |
| 30 | SEEERIAKLIIELLKRGINPERAVARVMFEIMELG |
| | DPELNHLVLRFFFTLKRDPEKFEELLRKLG |
| 31 | SKEERLKELLRLIKEAIKRNLTEEVERLAREAAEI |
| | AQELRDEEVLQEALLLWERFEIRRR |
| 32 | DELFQRVMELAFRLVLAAREKNDKDAEERAQRLER |
| | SVAKALESGDQDTAKTLVDRIEKYVKKEG |
| 33 | DPEKIIRELVRLALEAARKLNDDRVATAVLILLYA |
| | VLRLEKRDPEKAKKLLKEVEEKVKKLIS |
| 34 | DEVEELSKKVLHIATRLAFSPNPEDQQLWFKAMRL |
| | LDKAESIPDRDKATKVLRKAEKLVSSS |
| 35 | TPEEVMRTAFELLSEAARNNDRDRLKEIVKWVEDL |
| | VRKDPRVKDALEQVRLTLREMTHLAS |
| 36 | SERTASEVIMHAMQLGDHHVMREANRVYFGIVRGE |
| | LRPEDAKKLLDTLRRQLE |
| 37 | SEDESLKESLKHASKFFDIPSFEVRNSNGRLSVTV |
| | DGDDEKARMELITAQFAAMLRGLKLDVRTK |
| 38 | DEREILRKLIEISEELLRKATDEELRELLELVIAL |
| | SKEALRENDEELLEAAIRYNEVLIRNA |
| 39 | DFDTHEFEELEKVLEEARRKNDFRLAERAARLAAE |
| | SLERYRDAELVREALQEALLLWLALYK |
| 40 | PELDIAVVVAQIMADKIVKKASNPEIQKKAKTVKK |
| | LLEEARQKKDKDTVQKLWWKAVTLWQLVV |
| 41 | SERKLAHLLMIAVQQGDHKANVMLLRAVELLHKGE |
| | ASEEQADKIADEAKKRLS |
| 42 | DWKEIEKTARDLLKKARENNDRRTAFLVAVALKLA |
| | EIARKIQDPEERKRIEEVAKAALADA |
| 43 | TEEKIIRLWLDAARKGDRKANTLALRILEGLKRGE |
| | IDESQADKLADKIKKSLS |
| 44 | SRLEEIIRLAEELGNPYVAETLKMFLRAVRNGQLS |
| | PEWALANARALADYFGDPELLRLIEELIKK |
| 45 | NPYEELLRLIERLFERLQKENDEEVEKALSFVNAL |
| | LMLIARTTDEETKKELLRLALEKAKKVL |
| 46 | DEEEEAREHIQRQLEELEKHDPRAAVIFAAYIIER |
| | ARENNDETARKIAEKLLKEIEKRYRS |
| 47 | SEELKEEAKRLIKLLKDLARKASDRRERFILAALA |
| | ASLEKALKNNDEELERKLIEVAKSAIRRIQ |
| 48 | SREEVLHILNHLYFIAYERNDEELQHILARAMYIV |
| | FELLNRGDEESAKKVAEKAKKIVDKK |
| 49 | DKEELIEEAIEKLAPSPEAERYLRELLKEFKELGN |
| | PEAFLFLLWLAAEREGNPEVKRLVEELLRR |
| 50 | DDKEKTVKTIVRKLLRRAAHVDDPEVRTALLTLAY |
| | ILERALENQDDEALKRASKLAEKVLKSG |
| 51 | HETRDLNIRIETKREEELEHAERAQRLYFEAYLDA |
| | LRNRGNKVDAEIRLHIDGDTSHSRAHFRET |
| 52 | SEEHEKAREIAKKLAKRVRSGKLDSRQAKKIVARR |
| | YHHASRSGDKELAAILILVLFLLDEILRS |
| 53 | DEAQELARIVFELIVRLHRSPDPKDRKAAHFALRL |
| | LMKALKAQDPNERRSLLKTAIKYVRNT |
| 54 | DITWHARYT FHRHDEQAKREAESLAFLEVYKLER |
| | RAEELGLTSRFRIRSHEHNNRITIHLEIHIH |
| 55 | DPEEIKQRAEEIKKEFQKKGVSPEIQFAIEQVIKY |
| | ALEVGLSPKDIRTTIELTVRFAEELEK |
| 56 | SPEHAERLAKMLETLVKHAVKNPEERKTAETLIKQ |
| | VKELIKKGDEDSAQELLAKVYKIVWKAQH |
| 57 | DKDEVVQLALRILFEAYRRGNEEYYRKAQHLAALA |
| | FEAAEKNDEELLKKIEKKLRTLWKKLQS |
| 58 | DDDKEKKKKVKKKLDSIVEQAKKDPKRAMSLVLSI |
| | WMEAHRKNDEIVAKIAFEAWLKIMRIYSK |
| 59 | DEHLRKLLEKVMTLATKAWENNDEKVVSLLAEAQF |
| | WIALVDQDPRKKEEAQKRVETLLKQAEST |

TABLE 3A
FGFR2 binding polypeptides

| | |
|---|---|
| 60 | SEKLFKDINSLVISAEMAGVISEHEASRIERRLFE |
| | AYDRGLTEEVKKIKKEVKKLIKKARKS |
| 61 | SLLSQLLMEALQKGDPELNHLLLAVIFLAHERGIS |
| | PEEIDKLLEKLERELGDPREAIKLLLELLR |
| 62 | GPLNLLELTLWLASRRNPVARVLLRILRELRKRID |
| | PEEVLKILEEVARRLGDPFLLRNIEFILRL |
| 63 | SEEEKLTELSERVQKFFGLEHVEVRLNNGTITVTV |
| | RGDDERADQAIFFVREFAQLAGIPVDYKKQ |
| 64 | SEVELATKMIKHLAKQFGVPSVSVSYSNGRVRVTF |
| | KGNDDRVQQARLTALFVAHLVGVPLEVQTR |
| 65 | DPDEILDRVAQTLLTLAFQHPDDPELLKAFRRVVE |
| | ISQKAKKLSDPTQKERLARLAQRILEEVS |
| 66 | SIEEEILRWQFLAFKLGDPTLARLALRASHAYIEG |
| | DKKKARELIKKARKWY |
| 67 | SFEEVAELLRRAGLSPTEIITILYRLLRAFRHDPE |
| | RAKELVEELVKKLGLPPEARELLKELLTKH |
| 68 | TKEILQKVIEIVLKLVKKGVDPEQAVKIIRKILSE |
| | LIRQGKISKEEANMATVTAMFVAHLAKG |
| 69 | DEKTLAQEIIEEAKRAWEKYKDDPDELREFLRELL |
| | REAYELRLEEAIHFIQFLFFRLQLEG |
| 70 | DEIVRELEKLAKLPDAHMRLTVFLIRLFIHDPNDE |
| | KVEKLLAVLLELLLRGVSPEEIIKILKRVE |
| 71 | SSEKLKRAVEEARRKGDFELLWRIQLIALELGDEE |
| | VQNLAARAVMEMAKR |
| 72 | DPKEEAKKVTRLLLKLAHNADDDEIRVELLTLAYA |
| | LRRALERNDEEALKRVISKARKFIKDVKS |
| 73 | SRDELVEENIRFLARSAGVPSVSVSVSNGRISVTV |
| | DGDDEAAQELSSQALLYAHLAGLDLKVTIR |
| 74 | DEEKEKLRELAHESIRVALKRARSDEDHLRIARLY |
| | LALEKAVENNDKDLVKHLLEITTELAKRL |
| 75 | DKSDAEKILREALRLVWELGDRELFHLVSRLYLAF |
| | VRADKNNDKDLLDEITRQAEELLKRIKS |
| 76 | NWEEAAALALESASRAGDRELNEEILRIFFAVRRG |
| | EISEEEAHEMLREIAEKSR |
| 77 | SELLEKELRELLKNGNLEQAVLLIWFALHEAGDPE |
| | RAEEVWKLLREALERGDPDLVRKIIEEALK |
| 78 | SWEELYEKAKKLVEQAKKENDEDKLNKATLLVYMA |
| | HLAASELGDPTAQTSVERLAAHVFHVAI |
| 79 | SEEIEELIKELFRKARNPEVRTVLATLWLALERAR |
| | SPEEREEIERLERLIEEDPRLAREILKKLN |
| 80 | DSKELKRLLKEAEKKGDLELANRVAFLAHELGDEE |
| | VLRLASEVLSRIMG |
| 81 | SEIHKKLSELMMQAMQKGDEKALHIVNHAYFAYER |
| | GEIDPDQARKLAEEAERLLRS |
| 82 | GEEVLEKVERLAGGDPRLIAYALLRLFREARRRGD |
| | KDLLKKIEEAVELLERKDPELARLIKNSLP |
| 83 | DEWDERLKETFKKLQELLKQGKEEEAEKILKELIH |
| | EAEERNDEEAVQKALLLWERLLTERRK |
| 84 | DHWKEVEKWADTLLDEATKQNDPQKALFILFMAFL |
| | LLRRELSEEEAQRVISKLIRKVHERLR |
| 85 | DEEEEIRELIEKAVPDPELRRLLKENLKRLEEDGV |
| | PPEEILLTLAFAAERYGDPEVARLLFELLR |
| 86 | SERELFQRNVEFLARTAGVPSVEVRYTNGKYHVHL |
| | HGDNEALKDAKRQVELFAMFANLDVKVTTH |
| 87 | DETTKTAETLIKQLAEKAKNVPDPINVLILLFAAM |
| | LLAKEANDPRLEKLVDKLVREVLQYV |
| 88 | SEEELRRLKELLKKVNSPEAQMVLVTLLYLEHLGV |
| | SPEMVLRLLEEMLKRINPEALKLVKELLRR |
| 89 | DRTEILTLAFAILLMAKEKQIPEIEKLARKVVHLF |
| | SAVQRGELDETEATKRARHLWSLASSY |
| 90 | DEIQRELNHVYFEAHERGDEELVQKVTRVLYALFA |
| | GKIDKKEARKLVEKLKKLLS |
| 91 | DEIRETHHLILRLFFWAEEKNDREAEKIAARLLEL |
| | QAHALARRDEELLKKISKEAAKIVKELLK |
| 92 | DPDHAARLVNVLAFLAVEKNDEEAQREVSELIMIV |
| | MRAKENNDEEAVKEVEKRAKELLSKE |
| 93 | SEIEELLVHLLRLARELGNREALHVVLRAIIAYKR |
| | GRADEKQIRKLIKKAKSLLS |
| 94 | EVDELQKIAKKVRELAKKQNDEAALRTVEIALRAL |
| | ERAKQKNDEREVEAAKLAIAAAREHVEG |
| 95 | DQETVKKLESKADELAKKITDPRKRFLASVVKVNA |
| | RRAKNAEDPNDQTELIELAEIILRHLG |
| 96 | DQEEAEKILQRLLRIAYEARDEEFFLEVSLLAFAH |
| | ELALEEGDHEALEESIRIAEELLKEA |
| 97 | DEELKTLEKIVARLFHHAARNNDRKSLELATRAFF |
| | ALVEAKNADEEQQKKLKTLVKQLIKKIK |
| 98 | DLEEEADHLLSRVLLVAFERNDEEVNHIVLQLVFL |
| | LQKAKEENDEDKLKTLLKKAIEIARKLLS |
| 99 | SESEILKHSVSQAAKFLGVPHFEIHDNNGKFTVTV |
| | RGPDHVSRMLKLTVRFIAHQLGLDVKVTTQ |
| 100 | SEEETFKRLVQEWARKAGVPRVFVTTYNNKVYVLI |
| | HGNDESAKRLTKIVKKLAKEIGIDVKVQTH |
| 101 | KVVEQIILFAKFLGNPEVAEIIEKLLRELKERGVS |
| | PEEIERIIEELLEELGNETLLRNFRYLLEQ |
| 102 | DDDKEKKKKVKKKLDSIVEQAKKNPNHAMVLVERI |
| | LEEAQKKNDEIVEKIAEEANHKILRIFFK |
| 103 | SEEDKEHVAMWVIFLATQAAHDEDLERKARKKLDK |
| | ILKDLKVPEAEEFKKMFDEIVKQVRSMLK |
| 104 | SEIAEKLERLAVKAYEKGDRKALRIIARAQIAYAK |
| | GEIDPDQARKLAEKAERILRS |
| 105 | GEELEEIVRELRKRGISPIQILFILMEILFEKGDP |
| | VAHLLSQLIFAVAQGDIDPEEALELIIRLK |
| 106 | TEEYRITIHNRNDSEEEILKKETKAITLIYRILRK |
| | AEERGLRAHTRLSRTHRNNTTTERVTITVQ |
| 107 | PELVELLIEFVKRYDPELAEKLEENLKRLEEQGVP |
| | PEVIIFTLLLAVRAKDEELARRLFELVRRG |
| 108 | GEKYKEIVKSASRHAKEASKKNDKHLLHMLITFIK |
| | TIADTVPDEDVTKYAKKVATKLEQNG |
| 109 | DDEEVKTWEKLAKEAINRIPDKDTRTEVEKMVRML |
| | IKTAHSPDPTEVALALSLVEQIIREFRG |
| 110 | TEREAVKESLERAAKLFGVPSVEIDTRNGKVTVTV |
| | QGNDEAAKQLSFFAKFLALLAGVDLQVRHR |
| 111 | DLQEEIKRALKEGDEELVEKLLRELSKRSGAPPAL |
| | VLNNILVQLEEEGVIPPEELRKILEKFAKK |
| 112 | DLEEQAQLTARFVAHLVGVESVRVTVRNGKVSVTV |
| | TGTDEKAQKASRMIKFALKSFGLDVKVQVR |
| 113 | SEVSELARWVAANARAVKRRLEDPTKRKKAEKAEK |
| | LAKKAGHDPDEELARRLLTHLMMMLIEL |
| 114 | SQIEKMLRELTALARHKGDDKARKIVERAIERYRK |
| | GKIDPDQARKLAVKAFEILQS |
| 115 | DEEEEKQKEVDRVESHARRIPDKEKAQRFVKKYIE |
| | EARRRNDPKLVEMLAMVLTMIKALSEI |
| 116 | SEELASDVLRLALEAGDMEAANRATMIAMALITGD |
| | LSDKEAKKLLKKLKKEISS |
| 117 | DEEEKRVEELLRDPELIERFLAELLEEAVERGDPE |
| | LNHLVLAVLFALRRGDKDLLKKLLEELIRK |
| 118 | SLHELVALLWIRVPDPELEREILRVFFAIERGELD |
| | PKELARLIEELAKKVGDEEVLELVRKLLEK |
| 119 | DVRNLLALARTLAEQAAREDSEHARKTIESLSRFV |
| | DKLLKNVRTEELKKLAKKVKKTIESLERK |
| 120 | DIVEEAHKLLSRAMSEAMENDDPDKLRRANELYFK |
| | LEEALKNNDPKTSQELAKEVVTWAQSD |
| 121 | DMVEKLTTEAERVATKLERSPDPRNKHVARVIKSA |
| | IKQALSDSDKDSATLILFFAVNLARTF |
| 122 | DEKKELRHLLKIVLELNRKSTDDEARTETQTLAFA |
| | AILAEEKGDLELAIRILRKAIKIAEESVK |
| 123 | DSKEIEELRDKIRKIAKEVQNPRVALAALEVHTLL |
| | RHVRAGELDETRATELARAAFRQASQS |
| 124 | SRLEEALRLLAEVAGLPPEEIRRIFEEYRKEAGDP |
| | RAAIFTLLLALRERGLIPPEVLREVIHLVE |
| 125 | DEELELRALLIIYRILRALEKIHDEEERKRFMEDM |
| | IRKFREIFHVEEMIRLFERVLRRAAERAKG |
| 126 | SEELKKRAEQLIRELKDKARKASRERERFILVALA |
| | ASLERALKENDEELERRIIELIEAQERHQ |
| 127 | DYRELMSEAVQLILKALSLPDPRAHQRAQRLAFIL |
| | AHANNVPDETTAKQLIETAWREIQKVLG |
| 128 | PEYEKIVETLTKQAEEAIRKNDEEKLSRVFELVVR |
| | FYEEADESGDPRLRDLAHKLNHRVLRLEF |
| 129 | EPEEKARTFEELVRKAYKKDPSKAIHLHNRLLWEL |
| | LEEARRKNDEKLYRLAVELYVKLYRYLE |
| 130 | TETERKAHRLAAELFKKARKANNEELAETALHLTT |
| | LLYALERARTEEERKRILEELERFLREWER |
| 131 | GSVDELSKLVHKLYRIAFEKVQNPEERRKVQFVAF |
| | QAHLALKSSDPEEQKKAEELVKTLKKLV |
| 132 | SLEEEVERLLKEAGVPPEVIELIKELIERLKERGF |
| | PPEAILFTIVELLEELGNPEAARLIFELLR |
| 133 | DENKDKLRKLKEKVDKASKNKDKDTLTKLWFEAFK |
| | LARDVGDPHVIRVVAELAVRIFALIHR |
| 134 | SEEEIKRAAKLLGVPPEELKRYERRLLEDAGDPEA |
| | VKFTLALAIEKAGLPPEAEELLKKVLEILT |
| 135 | PPDEYLKTLIRLVHELFTSGDPHKQHLASRVLTLV |
| | FQAHLAEDPNEKETLIRKAQKLIKKAG |
| 136 | SEEEVKQRVTELIELWKKSGDDRFLEEAERILVKF |
| | YHEAAKRQDKRLIRTASRLFFKLEEIKRK |
| 137 | SEEEAIEMAVVSINQLLSPEAREILKELLKRVKKG |
| | DPEATRIISTAFYLARRDPEEATEFIKKLR |
| 138 | SKEEETTRLYELLLKNPEEFKKEIEELIRKTGDPR |
| | LEELLRLIEEALKEGDPFKLIFLVTLLLET |
| 139 | SKEEEVRELLRLLEEGDPHAAMRLLFLVTEAAGGD |
| | PDLANEIYERLLRLLKKNEEEAVKLLVELR |
| 140 | SEMTRKAIEMILNAAKNTARDPRIQKKIDKVLTKE |
| | KEAVKKNDEDKLREVAEQAFELSYQAVT |
| 145 | SETDKVKKVVDTLLTKAKQQQDPELAQEASSFAIE |
| | VINKNPRDETVRELVVKANMVFLQLHS |
| 146 | DDSEVETAKKLVDEVKKHSNDPRVKFIATAVKLNL |
| | DEAKKNNDEERLKSAVEMARVLYKEAM |
| 147 | DEELVEKAREALRKNDPRAAEVIFRLQIKAMEEGD |
| | EEKLRLAVVALWLFAEGDPDKAEKVLSKVP |
| 148 | SYEEMLKALLKEARKAGVPKAQKIIKKALKLLQEG |
| | KLDMDQLTRLMWEAWHLIS |
| 149 | SSEDIKKTATKAYKKGDYEALFKASYIAWQEGDED |
| | AASYVLRLLWEAAS |
| 150 | TKELVRKLKELLEKGDPRWESLISKIMMLASELGD |
| | PELLHLLNLAYFLYEEGDPRVREVLKELEK |
| 151 | DEEEIEELLKRAGLLSPKQVESLKEFVRRMKELGI |
| | SPEEVLEQLLLTERFIGDEEAVKLLESLLK |
| 152 | SRRELFQRNVEKIAKSAGVPSVEVRYTNGKYHVHL |
| | HGDNRELKIAKNQVELFAMFANLDVKVTTH |
| 153 | DRHQEFIRLIWETLRISRENNNEESHHLAAEAFLI |
| | WARALQNNIEEELKKAEEIAEKSLRLAR |
| 154 | DAVEQAELFLREMNSPVAREILKVLKELKERGVSP |
| | EEILRLLTEVAEKLGDPQLARNLRFFLEID |
| 155 | SEHVLKNIKKVVEHETKEIPDSKQAREQAKLFIRF |
| | ALRHIEDPDERRKVEEEATKLVQKI |
| 156 | DEIYRELFRLAEELNDPELLMLLLTAAFMLSHGNP |
| | DVERLLKRVLEVLEKGDPEEAKKLLKKLLK |
| 157 | DEIEEKLARLLWRALELGDDEAARLALEAQRLVAR |
| | GEIDPSQAKKLAKKLEKLVRS |
| 158 | DPRKKLKELVQRALRLAKEVGDEEILTLVFALHLA |
| | AERAIKNNDEDTLKRVEELLKRAIKKLES |
| 159 | SEEEKKELEELVRRAEEALKRNDDERVKEVLQRLY |
| | ELAARLEDREILHFVNRIHEKLYEKE |
| 160 | DRELAHLLLEAAERNDPKLNQLVLVAFFLLERGVP |
| | PEEIERLLRELAEELGVPPELLERITRVVR |
| 161 | PLEEELEKALKEGDPDKLHRLLTRIMMEASRRGNK |
| | EELRLINIIYFAIEEGNPEMAEKAIKLLQK |
| 162 | DELINEIIQLAVKDPEKAKELIKEIVKELRKKDPR |
| | LVKEFLEQLLLTLRELGDPELVKLVEKLLR |
| 163 | SPEEVLLELARKHNIEQAIQLLWLAAARDEELYKH |
| | VEELVRRNLEHVIVEQAKELLDRAR |
| 164 | DKEAIENYIRLLKRETENISDEELARQIRKKLKKA |
| | EELLRRGLEEEANELLIRIYFELRRR |
| 165 | SFEELAKEYKRTGDPRYLALLFQLLFELQFETGDP |
| | RLTRLIWMLMEAMKRNDPDLVEKLARLAEK |
| 166 | TELLERVVRLVKEGDPEKAEELLARLYLRLAREGD |
| | PETLRFVIAVELALARGNPDEAEKVVRQLK |
| 167 | SVVEKAFRAAYLALNKGDEKAVREAQRALFLYYRG |
| | EADKNQLDKIIETIIRRLRS |
| 168 | DLEELVRELLERNPEFKRLLEELREAEEEGDEELV |
| | ILLRLTLALALAEFLNIPPEEARKALELLT |
| 169 | SLDRALAAALEPARELGDPRVNHIVLQIIFELRHG |
| | VNPEELERALVERLRQVNPEVARLVEELLK |
| 170 | TTEEISKEIYRKAWKLAESVPDPHLREKAERVILT |
| | LSLMVLLIPNPEEAKKLAKKLEEIVRKIV |
| 171 | SVEEILEELSKKLKDPRIEEVRERLEEIVRRLNVS |
| | PIIAAFILSFELFERGDPRASIVVTALFLA |
| 172 | PPSQEFFLRLVEKVVKKAKQIPDPRSQKIAKRLEE |
| | LVKRARQVEDPKEKLHLVAVAAFLAAKVV |
| 173 | SPEDEKLREELKRLYKIIKNVEDPKEATKIWFRAM |
| | EIFENVTDPTLQTLARLVNHLALRVFLR |
| 174 | SREEAIQKSVEHALKFLGVPSFSVSISNNTLKVTV |
| | KGDDSAARMAEFSVKSIAMLAGVPVEVRLK |
| 175 | DKEELIEEAIEKLAPSPEAERYLREALKEFKELGN |
| | PEAFLFLLWFAAKRLGNPEVERLVRELLRR |
| 176 | SRDELLRRNVEFLARVAGIPSVSVTVENGTVKVKV |
| | KGNDERAQFFSEQVKLFARFIGIPVQVDLR |
| 177 | DRTEAARKAIDRAAKWFGVPSWSVDVRNGTLHVKI |
| | DGTDYSVKQLSFFAKFLAQLVGLPLKVDVR |
| 178 | PEEEEIETRARKKATHVVEVAKKNPEKAKRLIARL |
| | LVEAMEKNDHILNHVVNHAYFLIEEVERS |
| 179 | DRTETARRSIDRAAKWFGVPSWSVDVRNGTLHVKI |
| | DGTDDSVKELSLFARELAHLVGLPLKVDVR |
| 180 | DEHKELKELYDHILKLLRNAKTEEEVQELARKSVQ |
| | LAELLNIEELVQESLLLWLRLHNRLK |
| 181 | SIEEEILRWIMLAHKLGDPTLQSLAIEASHAYWNG |
| | DKKKARELIKKARKWY |
| 182 | SEEYRKKLREAVELGDPELVAQLLLTLAFLTGDPR |
| | LQELFSMLSELIFRGDPSLEEILKLVKELG |
| 183 | DEEEEKEKEVHKVLQTALRIPDKEKAQRFVKKYIE |
| | EARRRNDPKLEHLLRYVLMVIKKESDT |
| 184 | SFLETLKHLAEYLGDPELRKLLERLEELLKRGVSP |
| | EELLRIALRVARELGNPMFALTVEYLLHVP |
| 185 | SDEKVKEALKEVEKAVKKAGLDPKVVEWAERAAKE |
| | MKRRGISDDQISLFLRFVVELIRKNSS |
| 186 | SEELVERAKRLAGGDPRRALYLLLLALARRLNLPP |
| | RELAKILQKLRREAGGDPELLLKLLAELVE |
| 187 | NYERVIAHAARLAAELGDREALRRLNEIFFGAREG |
| | RIPPELAERLARRIEKKLRS |
| 188 | SLLSKIQELLERGDPEKVEELLRRLVELLRRDPDN |
| | EHLAMLLMQAVTIVAGGDPERANELFKRER |
| 189 | DEDEQVRLTVLYVAHLAGVPSVEVDRSNGRFTVTF |
| | DGDDDSARTASKTVKRMLTKMGLEVDVKTR |
| 190 | DPKEEAKKVTRELLKLAVNADDDEIRVELVTLAYA |
| | LKRALERNDEEALKRVISKARKFIKDVKS |
| 191 | SKEEWFSLAVKVSARYAGVPDVKVRVSNGRFEVTI |
| | NGDTDSARLAQQMVRDLAEIMGVEVDVQVR |
| 192 | SEEEIREIIETWKKDPKKAHRLVNRLLFEAYERGD |
| | PEKQSVAIRAAYLLYEGNPEEAEEVLKEIQ |
| 193 | DLEELLEEALREAGEPPESIERAKRRVEELLRRDP |
| | REAAKFVALFLQFVGNPELLKKVREIFEKT |
| 194 | PEEADKILEHLQKLFREALENRDEEAIAFIATLYL |
| | AAARAKRNNDQEALERVKKLLKEFKERKK |
| 195 | GEEEALKILAEVLGRPPEEIRKLVEKIARELRVPP |
| | EHAIKALALTIAFRINDPRVLRLIAEALEK |
| 196 | SEEERIKTSIERAAKWFGVPSEDIQTRNNRIHVTI |
| | DGDDDSARQLKLFIRELAEVNGVQVHVTIK |
| 197 | SIVEAVIEQVEKRGFPPEVLVATVWLALEKAGDPE |
| | KARLVQELAREVERGELPPEELKRLLREIE |
| 198 | SDDMRVLALAVSLMMFAQKQNDEKVEKTAITLWVQ |
| | LMDARLRNDEETTDKISKLIKDLATKLKS |
| 199 | DVEQLLLRYAWRALELGLEEHAVFIFRLLALVAKG |
| | EIDEREAHKLLEESRKRLEN |
| 200 | SEEAIRMLQSLEKTDPEVQAQFLEVLIEHRVPDPE |
| | ERRRLKETLKEIVERNDEELFERLVEEVER |
| 201 | PKEEEIKKLLKKLIKLAKELSNTPEARRMVKALER |
| | TVKELVKKTSPEDALKFAALALVSIEYIS |
| 202 | NSEEIKKEIKKAEKKGDSQKLLQLLWLAIELGDEE |
| | AAVFALEAQSRVMS |
| 203 | DEELKKQAEKLARLLVRLAAEVPNEEIALELITLA |
| | YALERASRNDDDERLKKVIDTAKEVVSKG |
| 204 | REEKIERLVREAERRIREGKISAQEVFEVQHRVYE |
| | LLRKKGDPRVEKLLHKIMRLLWMLAK |
| 205 | DEIERKLLKLSIIAWELGDQKALNLAASALFAVVA |
| | GEIDPSQAKKLAKKLEKLVRS |
| 206 | DKEELIEEAIEKLAPSPEAERYLREELKEFKELGN |
| | PEAFLFLLWLAAERLGNPEVKELVRRLLRR |
| 207 | SEQDVVRKNAERILKLVGVPHYEVSKSNGTVTVTV |
| | KGDDERARLALNQVKLFAMFLGVNVQVRIK |
| 208 | PAEEILRELLHRDPRDKVVVLLLYALLRAREEGRE |
| | SPEELIELLVRLARRAGNPELAKLLERLLR |
| 209 | NEERRRAIERILTRAKKLARDPRIQKKIDKVLTKF |
| | KEAVKKNDEEKLEEVLILATTLWLRAHK |
| 210 | KDELTEHVLKQLRQVLEEIRDYDRVREAAKLLAEF |
| | FRELDPRAEEAAKKALKIFEEELRKKQG |
| 211 | SLEDINRLIFIAHKLGDDKALRVLSHALMAWEKGD |
| | EELARKLVKKARKLLS |
| 212 | TEEIKRAVKHSVKDMVKNGLDPEWAVRVIRTFLEE |
| | MIRQGKISKEEAKEATKVAEKVAKKAKG |
| 213 | NFFHVVWRAQRIAMKKGDEKALSILARIAMEAAQG |
| | KLDPTKAERLARRIEKKLRS |
| 214 | DHEEKAVRLLWAILEVAEKKDDEKLHALVAQLYEQ |
| | LVEAAERNDEDSLKEITKKIEELLKKASS |
| 215 | DDHKEVIQSMLKSALRELKQYARDDSIREKVERLA |
| | TEASRKNDHHLANRVLFLIVKLIKDS |
| 216 | STVSREVETIHTSNPEEVKKWKKEAQKRAEKIAKK |
| | YRKQGLDVKVHTFEVRRGDTVIIIVEVRIN |
| 217 | IEEAKKLAMLVSMAAQMLAEGRLDERKWKKIVKEA |
| | SKILKKLGISEEEIRNFQKSAKELKKQF |
| 218 | SEKEEFIIENVKKLGDPNQIELFIAFAVKLSGDPR |
| | LKELLEIVKELIERGVSPEEILRIIEEFLK |
| 219 | SDRVAQFLLFLAFQTGDPRLRILFSVVVRLEEEGV |
| | SPEEIKEILEKVAKELGNEEVIREIKKLLD |
| 220 | SEIANEIMRVLWEALERGDEELALKALHVSHLLWT |
| | GEIPDEEAKKLAEKLKKLLS |
| 221 | DEREHARQRIEFLSALAQQIRRDEALEKAIRLMEE |
| | LARWAGIEDIERLVEEAIRRSRRAVKRE |
| 222 | SEAERLLSHLARIAAEKGNEKALHVVNRAIIALIE |
| | GLADEKQIRKLLKKAKSLLS |
| 223 | DKEEKITEFSQKLKEKVEKASEEEAERLIAKAYHE |
| | AMQRNDPDLALVILRVMFEFREKRS |
| 224 | DEEEAERLLAKLLRKARSPEERRLLTAVFFALREG |
| | DPETARRIVEELLRRVGDPELKRVLELIEK |
| 225 | SSSQRYQIRVDSSDPKDTEQAHRDAKTIAQRYAEE |
| | LRRQGNPVSYDLNYHRLNNLWMVVVHVRTK |
| 226 | KEWRDKLKSRLETVVKKAQKDPSYEEEAERVISEA |
| | MSIAMEEHDPEALHEANKAYFELHEYM |
| 227 | PEEDEEFLKAAFRTAQEALKEGDKRRAEFIIAAAE |
| | LYARHLDVEELKELAKELSEQFKEEVKR |
| 228 | SEEQRKLAEKLLSKAQEALKKNDTETLEKVVRRVL |
| | EIALKYDENPYIHKVAIDASLLWLMAAER |
| 229 | SRDEQFKKLVKDVKTLAKRQNDEEVLKAVERATKL |
| | FREAKKKNDEEKALRAWFALAIALEKLS |
| 230 | DELREILREALEKGDPRLVLQLLALLAFLAHRTGD |
| | PRLVKVYFIVAEALDKKDPELLKKALKLLK |
| 231 | SPEKVLLELARKHNIHQAIQLLWLAAAKDEELYKH |
| | VEELVRRNLEHVIVEQAKELLDRAR |
| 232 | SEHEAATESIKQAAKTIGVPHVEVDTRNGTLKVRI |
| | KGDDDAARMLQMSVKSVARLANLKVDVRTE |
| 233 | DVEKLVKEVEKLARKRGDRRAAFIARAILAAFRNG |
| | KLSSEAAERALKKLAKRLKG |
| 234 | EELKKILTELKKKATKALRNNDQSKVQHVIMVLAE |
| | IIHKAQTPEVRRTAAKLAFTLMRLTIQ |
| 235 | DETIHVQSEARWTVEEERRRALRWFARVSTRARRV |
| | ADRLNVDVEFHVEHRFHGEKVVIRIVVHER |
| 236 | SEDDEKVSEIFLRAYEIALKKNDPDQLSELNRWAF |
| | LFVEAQQRNDEELVKRLAKKFEEWVSKAQ |
| 237 | DEEAKYVHLMVESLRYYAKQAKDPTLAKQIKELAD |
| | KAERDNDPETVREALKVVTKAQKKSH |
| 238 | DYQKVNKLLDKATEIARKQNNPDVVFILVALKLSI |
| | EWAVKENDEEALKQLEHIASRFAKKE |
| 239 | PELDRMVHMAQRIADKIVKKASNPEIQKKAKTVKK |
| | LLEEARQKKDDETVIRLLMIAELLFLSVE |
| 240 | DDLKEKAKTLLELVKEASKKNDQKTERELSLELVA |
| | VEMEAQDPNVRHLVEKAYFIAMELAFK |
| 241 | SKEFVDSLLKHVEKLAKEVPNPEAKKILTKIKRLL |
| | EEANRRNDEAKAYLLVFTAWHQIRQLK |
| 242 | SFMSVIQRAINLAMKNGDEKAMNILLRIQFLALQG |
| | KMSEEQAEKRARRIEKKLKS |
| 243 | SEEEHVRKVIETMAKRFGVPDVKVSVRNGTVHVKV |
| | RGTDDAARQARLTAMFFAHLLGVPVSVTIR |
| 244 | DEKVAVKVLVVAFRLWDKTGDDSARKAILYASRVF |
| | MAAMNGDLSEKDRKKLEKTLRKIEKKLRS |
| 245 | STIEFAISVAKFYLEELRKLGLISDEEAKRIKEEL |
| | DELLRRGDERRVSQILNTLVELVVRG |
| 246 | SEEKAKELVEALKRRVEEAGDEELKKRIEKLVQEA |
| | RKKGLSWEEIATIVETLILAFETKKK |
| 247 | DAVERLERQVEKLVKEVINSGNPNSERAQRLLKLL |
| | KELLKKATSKEEQALAALTIALAVANA |
| 248 | SLQEQLERIIKTIAKRAGVPQVKVRERNNKVEVTV |
| | DGANQAAALVHLAVVRVARRLGLDVHVRVK |
| 249 | TTQETLVKSMIKQLKDVADNRDDPTVKKTLKTLAK |
| | ILEKALKNNDMSAINRALFLAMEVLKSG |
| 250 | SSKELKKRIEKAEKTGDVHKVMELALIAFMRGDQE |
| | AARLANRALFRLYNR |
| 251 | SQDRREDAKEIIKELVKIGNEIDARSVIMFLAYEI |
| | SEEEGLDEDQASEVLQELHEVLERLL |
| 252 | NWEELVKRAQTLIKRAQDTGDKSYVNEAWSVANVA |
| | AFLAVELNDPEVQHIVSKLLEQIITVADS |
| 253 | SKEEVVERAVRLLEEGNPFEASILIQMELLRLGIS |
| | PHEIVELINREMELFKRDPEEAKRFLREVG |
| 254 | PHVEELVKTIVSKAEEAIRKNDQETLSRLIETLFE |
| | LQKKDPRERDAAAVALLLIAELQESN |
| 255 | DLREEFQKVVKKAQEAAKNKDHEKAIRLVWRALEI |
| | ARKIGDEELERQVARVLLQVHELLR |
| 256 | SREEAVELYHIAVEKGNEEAARIAAAVYLGLARGE |
| | LDEDEARKLLEKVKKLLS |
| 257 | DEELKRAAKSMLDQAKKLADQISNDDLRKKAQSLV |
| | EKARKIDDPTVALTVAFTVRTIYEEVQS |
| 258 | DYREALRLLMAILELSERRNDEESHHEAARAYNHL |
| | SRARERNDEEAIKEVVEQLREQLERIEG |
| 259 | PERLRELLEESLRLAEERGDEELVNRTILLAFAFE |
| | IAKRRGDEERLKHLARLIEELWHENRN |
| 260 | SEEDKIQTLIDEVRKAAKRLYPDDEEVKKIESNAQ |
| | ELVDQAQDQELAKLSERELKHLLDSE |
| 261 | DISQELSKIVKSLIDELKKSPDPKDKHAAELAESA |
| | WRQAEEAQDPHERALILFFAISVVRNT |
| 262 | SRDELLRRNVEHLARLAGIPSVSVTVENGTVKVKV |
| | KGNDERAQFFSDQVKLFARFAGIPVQVDLR |
| 263 | DDDKKEARKEAALFAQAVRQGRLDKRAAKEAVRRR |
| | IKKARKSGDERLAKILELVLKLLDKILRS |
| 264 | DEILHKLARLLWRALELGDEKALKLALEAQKAVAR |
| | GEIDPSQAKKLAKKLEKLVRS |
| 265 | DEEERFREHLRRQLHELLRTDLRAAWIFVAYALER |
| | AKENNDELARKIAEELMRETEELIKN |
| 266 | GPEEFIELYRRWLKLGLSPITIANVILFAAYERND |
| | PDLIRAAAIFMLLIQRFDPEEALRLLQELG |
| 267 | DIEEFIETFLRSHNEDLRRIGTWSEEELKELTKLL |
| | RKLAEELDDEREIKNLLILIAFRSQLK |
| 268 | DEQELVKKVKTILTEASKKNDKEKVREALSLATRV |
| | MLHAKDAKVFEQLFKLELYALHVIKS |
| 269 | TRDELTKKNIEKLAKIAGVPSVKVTRSNGRWKVTE |
| | SGDDEAARDASNQILLFARFANLEVELTLK |
| 270 | NLERKLVRLYNEAVKLGDKDLMSRAVAVFFLIEDG |
| | RISDDDIRKLVEEVERLVR |
| 271 | DEEAFKIIFKLTVTVNKLLRKNPEQAKEFVKRVLK |
| | EAKEKNDHRTYMAAKAILRLIKEHG |
| 272 | PEDDEVEHTLVRVLWKAAEDGNSEVEEKAFRLQEL |
| | FMEAKKKNDEETLKKVITKAKKVIKKQ |
| 273 | SEEEHRKKLETELRKIREALKREEEAKKTKKWLRR |
| | LFREAVEKRDEELARLAALLYLAFERLR |
| 274 | ARRYTLTVRVPTGDPTETKKAEKRAKKFATDVSEK |
| | WKRNGYTVRFRVDVLRNGDRISVIVIVIIK |
| 275 | DLKKLVSRVVENLAEEIKKQASPDEQKKLDTLLEQ |
| | LKKALKNDDESTASKLWMIISEIWVRER |
| 276 | DEILEEIEEALRRGDPDLVERLISKLMLLAAELGD |
| | PKLLHAANRLYFALKKSPELVKEILEEVRK |
| 277 | SKEEKMKEAALRLTLIAQRLGVDRKYMHTAVRIFV |
| | KLVKNGVDLDQARRIAEKWLKKVVKS |
| 278 | TITESNTIILNGNSERVQKWAEEWLEEWRRKLSEL |
| | AKRIGLEIKHRIHRERDGKFIVIRIRSRIK |
| 279 | DESKKILDHLKTLLEKAIKNNDTETLNHLVLHLFF |
| | LARELNDEEAEKVAVEAYEVVHRLLR |
| 280 | PIEEEVKELIKIVEEALKNNDRETVSKVLFRALRL |
| | AVEVNNEELISRVNRLAFIAFTVT |
| 281 | DEEIEKLLEEVIGDPRIAREVLELFKELRKRIDPK |
| | EVLMMIIVLLNRLGVSPEVINLVLKILLLP |
| 282 | DWREYSKKLKKALKRAAKDPHDAEAYHEIFRILLA |
| | LEEIVPDPRIAEKLAQEASKQAREEVR |
| 283 | SEETKRIKKWAKKLAKKAGLDEETIKQAQKNVEEL |
| | ARQGESPEEIKTVIKQLIWLAKKR |
| 284 | DEEVLLELLQRTGDPRVLFILFLLKLLKEKGIPPE |
| | EALKIVEELIKELGDPEAERLLEIVRRRLP |
| 285 | DPTHILLEISLLAQELLRRGIDPRKAVKIVKKILS |
| | KLIKEGKISPDEAKEALKMAKDVAKLLS |
| 286 | DSEKLKEKVKKALKKGDVQALFEVVELAMELGDQE |
| | LANLATKALMILAKR |
| 287 | DVRKLLKEIIEIARKQGDERAVEIAAALLAATEQG |
| | ESSEENSREAAERLFERLRN |
| 288 | DELEKKVEKLAREAMQAVDNGDKDKVNTLVTELKK |
| | VVKSQPDNPAAEFAALAITMLEYLIKH |
| 289 | IEEAKKLKDKVRKAAEKLSQGRLDERKWMKIVTEA |
| | MKILAKLGISEEEIMHFSMQAYELKKKA |
| 290 | SKKEEAKEAIKALRRMAKWLGVDEKYIRTASEIFK |
| | KLVKNGVDLEEALNFASIWLMQVLES |
| 291 | SEETKKLQKKVREILKKAKSGKIDPHKALSLVMEI |
| | LAKAMEKGDKKVLSEANRAAFKLIELESS |
| 292 | DVELMAETAIKIARKKGDEKAVRILEKIAKLERKG |
| | LIDEHEALRRINHIYERLMK |
| 293 | DEVEEELKKIAEKLSEAIRKNDEDKVEHLKEALIN |
| | AAFRASHKYDPTRVQRIYRKVMRLAEKLG |
| 294 | SIVEELEELLRRGEVDPERLVARFWELLVREGDPH |
| | KALKAISLFMALKRGEIPPDEAVELLREIE |
| 295 | TIRVTITWRVDAHNEDENRASRRLAEEVREEAEEI |
| | AHRLNRRLDLSITVVREGDKVVTIVEFTIQ |
| 296 | TREILNKVVEIVLKLVKKGVDPEQAVKIIRKILSE |
| | LIRQGKISKDEARMATLTARFVAHLAKG |
| 297 | LVIIVFYNVDPRLVKKFAKLIGAERITLFRFGQSV |
| | ILFVKDASPELVKKAKKIVKPNRVTVRH |
| 298 | SVEEVVEEAKRRGELPPEVLALAYLAIFRAKERGL |
| | PPEDVARYVEKTARELGDKDLEELAKKLKK |
| 299 | DPKKLDELRKKIETFLRKATDPDARMAAYFALNAA |
| | EKALKDQDPLAERAARAAYRQAKKAQ |
| 300 | DKDKKIKDIVKTLVSRAKKDPRQAEEALRIVALLY |
| | LRAQREGDEHAAKLLRKALRLIHEAR |
| 301 | SEEERKEEAIRIFIRYALKRAKSEEEAKEALEAIW |
| | RRAEKKNEEETLKLLKEALKRIEEKEKR |
| 302 | SAVEQAELFLREMNTPVAREILKVLKELKERGVSP |
| | EEILRLLTEVAEKLGDPLLAENLRFLLEHD |
| 303 | DRTHHATFTARTTDEREQEELRQRALLWLDRRFFE |
| | AKRLGLRSRFRLSLTWDGDDWRVEAHHEVR |
| 304 | SKKEEAKDAIRALRRMAKRLGVDEKYIRTASEIFK |
| | KLVKNGVDLEEALNFASIWLLNVLNS |
| 305 | DEEVEKLLRRAEKLLKEAKKKNDKEKLQEAARLVL |
| | KAARLTTKREDLQRATHLAWRIAKLIN |
| 306 | SDNLWTDIFELVMRALDEGVISEEEAKRIMARLNR |
| | AWERGLTEEVKKIKKEVKKLIKKARKS |
| 307 | DVEEALRLAIREARKQGDEKAVKKLEKLLKALRKG |
| | LTSEETALRRASEIMERLVN |
| 308 | DSLMIEALRNVIRKIAKEVQNPEVEKLAKKVDKLL |
| | KLVRKGELDEREANKRALHLFFLAVSS |
| 309 | GERYSLTIHVDQRDERLWREAQRLALLWAFRFIYE |
| | ARRRGLEVHHSNREDTRGNRATNHVELQID |
| 310 | TEIRKELEKIRKEVEKLQKKGRIDERLVEMIKRMI |
| | KQAKKTGDPFALMFARSLLEELKKLSG |
| 311 | TTRYSSFYTSVAASPKEQKEIEKKAEKLAQKERKE |
| | AEKNGLKVTVRVRTHRRNGVVIVVVEVTVQ |
| 312 | SLEEIVKEVVKQVATFAGAEDVKVRISNGKVTVTE |
| | NGTDESARLASRVIKNMLWLAGVDVKVKLK |
| 313 | DVEELLEELKKLLSPELRNLLKVLLSQVKRIPDPE |
| | KREKLLRLIKEAVERNDEQLLQRLMELAVR |
| 314 | DYEIIFKLTKLLHEDPRKFEELVERLLRELGVSPE |
| | EIEKILRKVREIIKRDPNKAVSFVFQLIQR |
| 315 | DEKVARTVLEVASELAIRTGDQRAMEAARFAAHVI |
| | ERARRGELSEKDRKKLEKTLRKIEKKLRS |
| 316 | DEKLRKIANWIMKEAAKAGVSRELIMEASLKLIDA |
| | YVKGKIDPKKLAKKLLKELRKEVKK |
| 317 | TEEIKEQVKRAVKAAVREGVDPEAAVRAIRLLLRL |
| | LIEEGKISKEEAKEATKVAEKVAKKAKG |
| 318 | SETDKVKKVVDTLLTKAKQQQDPNLARQAFSFAVK |
| | VSEKDPNDETVAKLVEKASIVWLQLHK |
| 319 | TRTFRWHWEFKGPDEETRKTIEQLERDAEKFAQEF |
| | AEKYNVRYNVVVEVVNTGDRIQVVILVIFI |
| 320 | GEHRAQRLLWLAVELGDQKVAVKILKVIQLWQEGK |
| | ISDEDLERLAKEAEEELKK |
| 321 | DESVHKLAQKLLRKWAEAARKKDKKKLEEVEREAK |
| | EIADRIDNDEIKQQLMFFHFYAQKLKKDG |
| 322 | SDETKRLQKIAKKALKLLRQGKLDIEEAKRIVQKV |
| | VREATELGDEEAVRVAATIALALERIEEG |
| 323 | DSLEKKERTIARRLLREAERRRDEELIQKILLLWL |
| | AFERALENNDEDALKDITKKLEETFRKLQK |
| 324 | SAKELAKRLVKLAKEVAKKLSDEEKSRKIKELAKK |
| | LEKAVKNNDERTVAQVQARLAILVLRAS |
| 325 | DEIARAAIEEILERAKKLARDPRIQKKIDKVLTKF |
| | KEAVKKNDEEKLAKVYHFASRLFAEAQS |
| 326 | SKEMQKVVTKVTSKAHKLGVSPEAIFEITLQIARL |
| | EDEGKLSPEQIEKWADKLAKKIAKKAS |
| 327 | SSEKAKKKIDKAIRNGDAQTAARALNEAYERGLIS |
| | PKEWYKLAERVVKARG |
| 328 | DEEEKVAKELRKVLKDAGATSFRVMILNGKIVVLE |
| | RGTSPEVKRASKVVTKYARSQGWKLQVNVL |
| 329 | SEEEQSRYLEMFLSHMFGVESVRVSVHNGTIHITV |
| | KGQTDAARAAQQYAKSYARVLNTKVDVKVK |
| 330 | LVIIVFAHVDPRLVKKFAKLIGAERIRVYREGDSV |
| | ILFVKDASPELVKKAKKIVKPNRVQVVH |
| 331 | DEENLKILIDQSGNPEDAVHQLSLFAKFKGISPEE |
| | IEKILEKVLRELGKVSPEEIEELKRLLKEK |
| 332 | QKHITITINLRNPHKDEEKEARERLRKFAKKVVEE |
| | ARKRGQKARIHETTVEFNGTRSVSVLVIIR |
| 333 | SMEQANVVLFVAAELLKKTGDDSARKAIRYALTVL |
| | HRAYEGKLSEKDRKKAEKTERKLEKKERS |
| 334 | DREELLRELNRLAFLVVRVIKDPKYVKTAARLFVK |
| | AYELANKGDEESAKKVQKSTETIITRYKS |
| 335 | SEEEKRKRAKKKVRKIARSLGLSEEIARTLEFIFD |
| | SLVELGVSIEMALKVIERFAKKLAKG |
| 336 | SSKELKKRIKKALKTGDVEKVIELSHIALQRGDEE |
| | AARLASRALFDEVNR |
| 337 | TQQVQTYVSYDPNDEHDEERAKEILEDRVRKVVKK |
| | HQKQGLEVRVRRRTINENGNRVLAVRIEIR |
| 338 | TDEREEVQELQKRLMDAAQKKDQEKLKKVVKEAKD |
| | IAKKVGDPMVENLLRYAITVAQKAVS |
| 339 | DEARKALVFVSLALAEYGVPHVKVNIRNGKITIRI |
| | EGDSPEAQTASEIAKKLVKQLGLPVDVQVR |
| 340 | LVIIVFENVDPRLVKKFAKLIGAERITVYRFGQIV |
| | LLFVKDASPELVKKAKKIVKPNRVRVVH |
| 341 | SKELEKVIKKVNKKAKKLGVSPEQIKRIEKEIREA |
| | YKRGERSPEEIERLAEFWAEFAARLAE |
| 342 | DERLEHLKRLSERLFREALERRDERAIRIASLTHL |
| | ALAKARNADKEEREEALRLVEHLLRLAE |
| 343 | DDIQKEARKVNHQLMEIFFRYPDNEKIVKLVTHAA |
| | SLALEAFDKNDEEILKKAKKLLEKVKKIC |
| 344 | DKLTKAAKELAKKVKSGKLSPEEAAMWLSMIATRL |
| | GIDREEIHKAIRKLLKLIKS |
| 345 | SEEVERRVKKLIEKAKEAVKKNDEKKVKDVLAILV |
| | SLMMEAQTEEERRIVITAWFIVMQLHH |
| 346 | EVIVLVTFTRNGKRTSVTFRVDDDPREVKKAEKLA |
| | KDLAKKLKDQGVPLVLRVRKGDQRKRIEFR |
| 347 | SDETKRLQKIAKKALKLLRQGKLDIEEAKRIVQKV |
| | VREAEELGDEEAVEVAASIYLALRKIEEG |
| 348 | DLKKIARKLLSIAFELGNHKIFTLVQRIFLAIKDG |
| | DEKTAKKLIKKAQSLAS |
| 349 | DEKEKVRRVQKYATKLARKAGVSEEAIKILRELVE |
| | ALIRNGVDASQAKDIARRFIEMTREL |
| 350 | SKELIEEALRLLEKGDPRVEKVIVKLENEAVRKND |
| | RDLNIEVIRVEMLLRNGNPEEARKLLRKLR |
| 351 | SLAEVVRKNVKRIAKMVGVPGVSVDVRNGTVTVTE |
| | DGNDEHARRASEQVKLFARFLGVTVKVTER |
| 352 | SIEELVKHVVKEVARVAGVPSVSVKIKDGKVSVTF |
| | KGTDEAAKEASMLVKLTAHLMGLDVDVKEK |
| 353 | SEEEKRKRAKKKVRKIARSIGLSEELAETLEFTFE |
| | SLVELGVSIEMALKIIERFAKKLAKG |
| 354 | DKTELVKRIVKEVAEVAGVTDFQVTVSNGKYHVRI |
| | NGNDESAQNVRSLIELSAFLAGIDVKVTVE |
| 355 | SEEERIEKSVKQAAKFAGVESVSVRVSNGTIEVHL |
| | QGDNDAARQVELFLRFVSHLSGIPVDVQIR |
| 356 | TEEEFLKTSIKELAKLVGVPSVRVRVSNGTVQVEV |
| | DGNDRAAKDFSQQLKLFARFAGIPLDVKIK |
| 357 | SEEVAKMIKKNVEKIAKMLGLSEKITRTAKKVVEK |
| | AYRKGVDPLEVTNLALQFLVKAAESK |
| 358 | SEEELIREAIELVAPDPNLKETLKLTLRFAKHLGA |
| | SPERIIFTLEKFLEDQGNPELAELFRKIVK |
| 359 | DYRKAVQYLIRVLREALRKNNEELVQLVNRAMFIL |
| | VEVSKSNDEEKLDKVASKLIKELQEASS |
| 360 | SSSTTWTYTHQPRDVQEAAEFLFKVLKEARERARR |
| | LRKQGIDVKLRVRREWRNGKVTIQVTVEEK |
| 361 | NLALIAVESLAKELYEKIGDPEIDKIRKKVEKLIR |
| | KYREGKLDESEAFNRAAKLQEELMKFI |
| 362 | SEEETRKRAKKSVRHFARWFGLSEEIARKLEKLFE |
| | KLVKSGISAEEAMNFISVIAVQISEG |
| 363 | SLLELLLRLLREGDPRVERVITRLLSLAIQRNDPK |
| | LLQVVNLIYFAIKNNDPDMVERAIERAKEL |
| 364 | SVTELVEEIVEKFKDDPEEVERLLQELAEKLKDPR |
| | LQQAVFTEKFALKLGASPEIIKETLRQFLK |
| 365 | SWIRLAWEALEIAERLGDEKAHRAVARILHLLARG |
| | RISEEEAEKALKRLIKKLK |
| 366 | SEEAIVRLYFKAARRGNRKVLRVLIRAVLALWRGD |
| | EETARKLLKLARKLD |
| 367 | SEEEKKIRKLVEKLKRKGKLSDREIANYVVKYWLK |
| | QGKLSEEQLLRATLIVQEVVG |
| 368 | TEEERHVEAVEVAARAAIQANDKEAIKKILEAAET |
| | VAKRISNPDLSKKVQKLIKKLRKALKS |
| 369 | SEISEKLLKLLEKAYEKGDEKALQIVTKALMLLSK |
| | GEIDPDQARKLAEKAERIERS |
| 370 | DIHSEYHIKIDPTDEQEEKRARLRAEALAYLAREK |
| | AEERGLENHNHIEIREHNGTIHVEIRINVH |
| 371 | SQMEKARRAQKYAEKLARKAGVSDDQIEQLKQAAR |
| | FLFAQGVDASQVKDILRKLIEKIKKS |
| 372 | SEETKRIKKWAKKLAKKAGLDEWAIKLAQELVERL |
| | ARNGIDPEVIKRMIELTIREMKKL |
| 373 | DEEEAKFAVAVVKQLAKELNDEETLKILEEAEREA |
| | RERNDWRIVEKVAVKLYALLSRER |
| 374 | DEIVELLFKLQYLALQLGDEKALRLAAKALMLLAS |
| | GNIDPSQAKKLAKKLEKLVRS |
| 375 | SVVVIVDDERLAKLVSKLVNVERFQISTHGNLVLL |
| | NLVGVDPELAKKAVKTANKDAVVRVH |
| 376 | DVIEEILRLLRELGRLSPSVERALEFLREMLKRGV |
| | DPKDVLNQLLLFARFIGDPDVEKLAEEFLK |
| 377 | DDRKKVEDTLRKKEKEAEKNNDEQALARVVWKALE |
| | LAEKEDDPELEKVAAELFETLARIQK |
| 378 | SEIEKKLARLLVKAFEKGDRKANEIVIKALFAYFH |
| | GLVDPDQARKLAEKAERILRS |
| 379 | DRDELIEENLRFFSEAANVPDVKFSVKDGRVKVTE |
| | NGDDEAAREAARAIRIFAWFAGVDVKVTTR |
| 380 | SRDELLRRNVEKLARIAGIPSVSVTVENGTVKVKV |
| | KGNDERAQFFSNQVHLFARESGIPVQVDLR |
| 381 | TEQEMASHTIKEAAFLAGVSDVKVDVRNGTLKVTV |
| | RGNNESAQVLKKNVERIAKHFGVRVEVQTR |
| 382 | DEEVKEILEELKKRGVDPEEVFKIAAKILEEKLNI |
| | SPTEAIFIAQYVALELGDPELLTVAAKLIL |
| 383 | DLWRLINRAAFLAVELGDQKVQQLALKAARAAMKG |
| | DEKTVKKLIKKAESLLS |
| 384 | SEEDKIQTLIDEVRKAAKRLYPDDEEVKKIESNAQ |
| | ELVDQASDQEEAKLTERELKHLLDSE |
| 385 | IEEVKKLMLLVSFAALRLANGKLDERKWKKIVKEA |
| | SKILKKLGISEEEIRDFQRIAKELKKQL |
| 386 | DHLDEILKRIFELERKAWEIGDEELERRLRLEQLT |
| | LLLRLAAHLDKEEREKLIKKWARLFQRAK |
| 387 | TTVRVYNFEARTDDEELLRKARELAKKLLKESKEW |
| | AERKGGKVKNRISFDRRGDKIWIIAVSSVE |
| 388 | SLKELLQEARERGDEDLLKVLSLLLFLIKLANIPP |
| | EEALKALERQLREHGDPDLLELLKELKELP |
| 389 | EERVLSLLQAAIFVAAEKGDSHRAEQAMKLAILLF |
| | LAEHSGDEELVKKISTKAEKLAKKVLS |
| 390 | DPLIFELLIRVQELADKFGLSPDEIKRELNIAARL |
| | IVKGVTPEEIERYIKEELEKFKRKQY |
| 391 | DEEKLERQARAALILAHQFDAEDEQARRFAKEAAR |
| | KLFEAIERNNDELVEEIIREIERHLKESRG |
| 392 | SKKEILEKVLELLKKNPDEAAQLILFLAFETGDPK |
| | VRRIFSVIAELIQTGDPELRKEAEKLLKRT |
| 393 | SWEELYEKAKKLVEQAKKENDEDKLRKARRLANRA |
| | AFAAVELGDPTAQRSAFHLYEIVHSVAE |
| 394 | DEHKAMLKTLIEELLRFAIELVDNPEERKKVTTLA |
| | KKIKKLLEKDPDTARRLALKLFREALKK |
| 395 | DVEVLMRVVEVANELLQRTGDDSANKAASWANRII |
| | FRAIRGELSEKDRKKAEKEARKIEKKLRS |
| 396 | DDILSEINRVVFEAHRRGDDEILRKASRVAMLLLS |
| | GKIDDKEAKKLAEKLKKLLS |
| 397 | DEHIRNTIDIHGTDKHARELVERYIVESERKAREE |
| | AERRGLKVHSEWETRERDGHVHVEHRVTLR |
| 398 | SEEEIRRVIELIKKKNEMLAISLAFLLELVKRGEF |
| | SPEEFLNSAKRLVRWYGDPDAEELLKELEK |
| 399 | DPTEWKRQVEMMAWINAEFGVDPRQVVKMVKKLLS |
| | EAQERGVVSPDEAKEALKVAKKVAKRLS |
| 400 | SRDETVERNVKFLARSAGVPSVDVKVSNGTVKVTI |
| | KGNDERAKFLTDQVRLFAMFAGLPFDVQVR |
| 401 | LRSEVIKYTIKGDSEEARKHAEELIRRERHRAREL |
| | AKRLHLRLRLFVKTTERGDTIHVDINILIR |
| 402 | DKEQEDKVKEVIKRAKELVKKNPEEALSLVFKLWK |
| | EARDKNDERLMRLANVAAFEVHRYIS |
| 403 | DIRKVTQLIFAIVEIAARKNDEELYKLAVKAYFEY |
| | EDARRKNDEKKSKEVTKKVEKLWKRAQS |
| 404 | SVREVLFELIKIVRELLERGVTPEKIKRIVEEILR |
| | RLLKKGKLTPQAVRFLRKSVERALEYLEG |
| 405 | SEMLATLVQNAAKKAGDKEATKIARKLVKLLREGK |
| | VSPSEVIEILFKLQIRLL |
| 406 | FELIVFQLDFHKDDSSARKKFKDTVKKLKKKLEDI |
| | ARKRNTTESVHTHERRNGDIVILLVNFVVR |
| 407 | SKEDKAIRALFRLSEIAMKLGVDMKYIRTASEIFV |
| | KLVKNGVDLDQARRIAEKWLKKVVKS |
| 408 | DPNEEWLHQQAEMVRELAENLRDPRQIQDLVTAAE |
| | KMANAAEDPRVSKEVKKKLEEIYKKAV |
| 409 | DMLEVLKAALLAYRLGLKEALREAQQAVERLADGK |
| | ASEEDADKELKKIRKKLNS |
| 410 | DELLKKVKKRLEKLEETAKRQNNPEALKVVQAVER |
| | DVKEALKRNDRERVHILLLFAEHWEKRLS |
| 411 | LLIIWFENVDPRLVKKFAKLIGAERIRLYRFGNSV |
| | LLFVKDASPELVKKAKKIVKPNRVTVKK |
| 412 | SRAAAKVMKVAIKAFEAGDPKAVRLANRILFALYR |
| | GEIDESQAKKLADEILKKIG |
| 413 | SEELKKLEKRLEEILRRLGVSPEQIKLLRKNLRKS |
| | YKISDSSAAKVEVEFVRQLFEKQRS |
| 414 | PIKDEAKKIAKELITKAVKHQNPELAFEATLVLVR |
| | LAEQYGLSLEWVNEVLKELVDKAKKS |
| 415 | PKWAEVNHILIRAILRAFEVGDEEVMRKAARLLFL |
| | LFEISDKNDEESLDKVEEKARKLLKKAI |
| 416 | DETVSHLLLLLLEAAYLALERNDPEGASRAQRALF |
| | IAMHLAQDPDPKAQKKAQDIAKTVYSEVS |
| 417 | DESEYETATRLAESAVKKVQDPEAEHLLRSIKKQW |
| | KELKSKYDDDEAVKYYHLMAYFLIQRFG |
| 418 | DEYEMISNQLTLFARFLGVGSFKVSIDNGRIKVHV |
| | KGNDHAAEDITEAAKFFSKLFGIPIDVQTH |
| 419 | DEEEEKEKEVRKVERTAIRIPDKEKAQREVKKYIE |
| | EARRRNDPKLEHLLRYVLMVIKMFSDT |
| 420 | DIHHTVQIDSDKLGEEQKEQILRALRFTAWLALRE |
| | FRERGIDVKVRITSETHGDRTHQRVHLRAT |
| 421 | SSTESAVRLIRETVKILNPPSVTVTSSNGRVHVKI |
| | DGDTRLARQLQFFALMNSFMVGVPLDVQVR |
| 422 | SVQDSVEFILRLLGVSPEIIERVVRRIEELLKEGD |
| | REEVIRLIKKIAEELGDPQLELFARFLKAL |
| 423 | SKKEKAKEAEKKLRKIAKKLGVDERMIREASRFFE |
| | INLMFGVDLDIARRMAEMYLKMMVKI |
| 424 | SEIVKLLVRLARLAVELGKEKALHIVARALYALAK |
| | GAIDPDQARKLAEKAERILRS |
| 425 | DLASEALRLAFEAFKRGDRKAMHLALKASILIFEG |
| | EISEKQAKKLIKRIKKLIKG |
| 426 | SSDESVTRAVKFLATMAGVKSVKIRKRNGRIEVTV |
| | HATTSAAEDVVNLIRLTAMRLNIELDVKIK |
| 427 | DETKKIQKEVKELADDARKSISDPRLRELVALART |
| | LAQVAARDPRFKEMVKTLKRIIKELKKQG |
| 428 | DEIQSKINRLAFLAFKLGDRKAQSLAIKASHLVMD |
| | GRIDPSQAKKLAKKLEKLVRS |
| 429 | SEEYEIRVTFDPNDREAEQEARLKVLFAVYRLLRE |
| | AEERGTQPEAEIREREDQDSITITIKVKFR |
| 430 | DHLKELFEHLLRLAFEASKTASEEQRHLLLTLLFA |
| | IRRALENNDEERAEKLLRSLEESIKRIR |
| 431 | DIEEEIRSLAKKLLEIIRKDPRHKEEAEKTLVRLL |
| | FEAMKKNDQKRAAAISMAFLFLHESQ |
| 432 | SEEEKKKLEKLFKKLIKILQNAPNPELRELARALE |
| | RLFREAKKNNDAQALSNLVLRAKLVVEKG |
| 433 | DEEEEIRELIEKAVPDPELRRLLKEQLKRLEEEGV |
| | PPEEILFTLIFAALRYGDPEVARLLFELAQ |
| 434 | DVEKQAKKAIKLARKKGDEKAVRLLEKIAKLYRKG |
| | LIDEREARTLILTIALALLL |
| 435 | DEEVKKLLTEATKLSKEARSKASDEMNRYFLENTY |
| | RYLISQVKNASEDQKRELAKMAYEVLKAG |
| 436 | DRRRRFRIAAALLSAKLLARDPRIQKKIDKVLTKF |
| | EEAVKKNDEDKLKEVEEQARKLFKQARK |
| 437 | SEELKKLEKRLEEILRRIGVDPRAIKRLRKFLREV |
| | YKDTTSEQAKLFVRQVRHLAEVHRS |
| 438 | DLRQANRAAFEAYRQGNREAQRLAVQLTSGLQDGN |
| | TSEEEAKDALRKLKEALSS |
| 439 | SSEKLKRLAKEALKKGDEKLLSRLMSIAMELGDKE |
| | ALREINRAYFEVAR |
| 440 | SDEKEKLKKWIDKLVKKEGLSPEQRRILELTLRFA |
| | WRLGASPDIIKEILRQAAEMMKKRG |
| 441 | DEELSEKIEEALKRGDERLVVQLVLRLATLAFEKG |
| | DEELARRLQVVLFLLSRDPEKAVRLVERLV |
| 442 | DYERVISRALELAAEKGDHKALRELNEIFFRAHEG |
| | KLDPTKAERLARRIEKKLRS |
| 443 | DELEKLHTEAERIATKLERSPDPENKTIAEAIKAA |
| | LRQALSDSDKESAKMVAYFAVNAARMV |
| 444 | DEREKERAEFIAAALSLLAASSDEREREEARRLAE |
| | AARRELSRKDSRLAEYFRHVFEESVRRLG |
| 445 | SREEVVRELLERFPDPREVLVLLYNILIRLGDPQL |
| | AALVAFLFHKLENGEIDPEEVRELVRRIVK |
| 446 | SREELLTRNVEFLAEQAGVPSFSVRVSNGKVKVTI |
| | EGTDEAAKFAVNQVLLFAMEMGVDVDIQVR |
| 447 | SDESKRHSFLTKLVALFMEARDPKFQHLLARAYDE |
| | FFRALDRNDKETLDKVIKKLDKIEKSY |
| 448 | NLEYDALRLIFLAFLKGDEKARTIARKLQAAIMKG |
| | DEDAIKKLATKLKRIL |
| 449 | SDETKRLQKIARKALKLLRQGKLDIEEALTIALRV |
| | VYIARELGASEAAEEAFRIQYALLEIEHG |
| 450 | PREEVLKILEELLKAPDPEKVIARLLLHASREGDE |
| | EKNRLVLAVIFLLREGVPPEEIREILRKLT |
| 451 | SEVARRLLELLKQGNEEEAQHLVVRALWEAAERGD |
| | SELALLLFRVQFLLMQGDPRVEEVLKRLEK |
| 452 | SSSQRYQINVDSSDPKDTEQAHRDAKTIAQRYAEE |
| | LRRQGNPVNYEVNYSELNNLWVVFVTVHTK |
| 453 | SEDEKIKKHVKTRIKQILSKNSPEARKEAANYANR |
| | VVFHLYHVPDPHKQKLANEIFHYWSRLR |
| 454 | LEREHAIKRIVEHLVKHFGLSRDIEKTLKKVVEKL |
| | LKKGVDVFRITLIVSQLADEWARRLK |
| 455 | SDESRRELEERLEEAVRRGDEEKLRLLASTLAYAF |
| | LRAGKLSSREALKYVEELIKELKKRV |
| 456 | SKEEVLSRMARLTFRFAGATDVKVTIRNGKVTVEV |
| | RGDTPSVRAASRMVTWLAKRQGVDLKIRVK |
| 457 | SRETLKRRVKEAYKRGDAHELFKILFEAMERGDDE |
| | VIRFVLRVQFKLARR |
| 458 | DHRIRITFHFTGDDEKTKKEIQKEIERIRKELREE |
| | AKRKGKDIRIFVQRRRHGSTLVIYVVVRRK |
| 459 | SEIMARAVIKLARKKGDEKAVKIAEKILKAAERGL |
| | YTHEALHKLNHLIFYLMRK |
| 460 | SEEETIEEIEKLLERAVRELRVEELRRLVEELLKE |
| | ARRINDLRFFEEAAQIALLAWLQDAL |
| 461 | SELREINRLMFLAVELGDPKLAQIALKAYRALRSG |
| | DEKTIKKLLKIAHKLVKS |
| 462 | NAERVVRLVKKLREELNVPPEEAIKILLEEALRRG |
| | DEELVFYLIFLLILVLGDPEKVREIFERLR |
| 463 | DLAREASHVLAQLAFSAEKTHNEELSRLQHRLAAL |
| | LAEAIIRNDEELLKHLIRLARELLKRVHN |
| 464 | PEDDEVQRTLQSVLEKATKDGNEEVIRKALKLNFL |
| | FFLAKRNNDEETLKKVITKAKKVIKKQ |
| 465 | SEDDKAHKVLQTVLELLSKDPKKAQDFVKTFLKKA |
| | QKNNNERLVHLARYILMQAQMER |
| 466 | TELVELAIELAKRLGDEMLVVSLMFILELVRRGEY |
| | SPEEAEHAVVRLARQFGNPVVEIIERLLKK |
| 467 | TERELIEENVKFLAKLANLSDVKVSFSNGKVTVNI |
| | NGTSEHADDLRRQLTLFARFANLRVDVQTK |
| 468 | SEEEIRELIEKLGDPRIAIFTLLYALERKGKVPPE |
| | ELHEALRRLLKLLKEGNEEEVRRLLTELID |
| 469 | SEEELKRIVERVVEGDPDARRIEVELYNELVKKGD |
| | PQKAIILAFILTLAEEGNPEDAKRLVELLR |
| 470 | TEERRWRWELRKPSRQEEDETRAEALRVAYKALRE |
| | ADERGGDAHSRVRVKHDGDTVTVETRVEIR |
| 471 | DRTETARRSIDRAAKFLGVPSWSVDVRNGTLHVKI |
| | DGTDDAVRQLSLFALFIAHLVGLPLKVDVR |
| 472 | SDRAFRKAVHIVEAAARRLNLEWAEELAKHLLRLW |
| | EEALRRNDEEALKWLFEELSRVMYRLAQ |
| 473 | DWRIAHRLLREANRIAYELGNERLWQLVARNFLAL |
| | AKAIKNNDEELLKRLIESSKRLLEEIKR |
| 474 | SSSTTWTYTHQPRDREEAFRFAAKVAKEARERARR |
| | LRKQGIDVKLRRRLEWHNGKLTIQVTVEEK |
| 475 | DEVRLAVTAFLLGDPEAASLINVLIFALVEGDPEK |
| | LREALKRAEEVAKRLNDPVLEKAVKIAKKA |
| 476 | PLEEELERLLKENPRAAVTTALFLAQERGDPDLFK |
| | ELLELLRLLEEDPNDEEVIRRVEKILRELQ |
| 477 | SLEQAIEFLLKTQGDPAARIVLEFVRELRERGVSP |
| | EEVLRLVEELLKKLNTPAARQLLLFIMELK |
| 478 | SSAHVIIEALKLARKKGDEKALRLLNRLAFRAVRG |
| | ELDPTKAERLARRIEKKLRS |
| 479 | DVEELVEEVLRKNDPRVLEKVLRLLREREGDPIRA |
| | FYILIELIAKILKVPPHEAAEILHRLLRLL |
| 480 | SAEDDVTSLVRLSAWMAGVPHVEVSFKDGRVSVTL |
| | KGTSPSVRSAKRVIQRVAKMMGVRIEVKTR |
| 481 | SIEEDVKMIVKLSAFLAGAEDVKVRISNGKVTVTE |
| | NGTDDAARSASRMIKHVLTMLGVDVKVKLK |
| 482 | DLEEAVERVIKRFKDDPENVAILLAFLLLLALEKD |
| | PRIVEEALRLIEELLGDPELVKWLERAVKQ |
| 483 | SETEILRVLFIAHRKGNREVAELALRASVAAFLGD |
| | PKTAEKLLRKAKKLLKS |
| 484 | DEDKELEEIVKKLAEDPTVQEIILKVASNSPYLRR |
| | TIIKLFREDPRQAHLFIRFLAHQLK |
| 485 | SIDELLEKNLRKIGDPNLLRLTAVFIVSEALNVDP |
| | EEARKLLEKLERELGDPEEALRLAVRLALK |
| 486 | NLIAEAVWKIARELYEKIGDPEIDKLRKYVEKLIR |
| | KYREGKLDEHELNERALRVLFKLYRFI |
| 487 | SYEEILVKAYFILAEQFFERPDDEHIRKALLYVLR |
| | LVMKAIKASDPKESHEIARQVEEFLKKVS |
| 488 | KDIEKEIVKVEHTAMERGDIELALKASLVFMALHR |
| | GEISDEQAKKLAEKLKKLLS |
| 489 | DELLTEIIHLAARDPEKAKELIKEIVKELRKKDPR |
| | LVKEFLSMLLITLRELGDPELVKLVEKLER |
| 490 | SRVEKILVRLIARTGDPKYTLIAFALILLRREGLP |
| | PEEILKIVEKIVREANDPDLLRILEEAIKR |
| 491 | DIVEKVRRLATVAIFVAHKQNNEEIAVTLMKLIHQ |
| | AHEAKLNNDEETLDKIRKIVETLYKRVV |
| 492 | SDETKRLQKIAKKALKLLRQGKLDWSEAIRIVLKV |
| | AKIAWELGDQKALNVANSIAFILVKIHKG |
| 493 | PEESEKFKKTVETRVKRAVDNRDMDLVNRVVWEAL |
| | EIARRLNDPELEKWAAKLWLKAVRNI |
| 494 | SEEFRRHIEFLNRLLHLAHHHRELAEEAIRLLREH |
| | AEHAKRINNEVLAELSERLARQLEEAIRH |
| 495 | DESERVRLAFWAAAHAYKHAQSEEEKKLAEAALRS |
| | AVKFAETKSDPKMQKLAKKLKEKLKKIV |
| 496 | SEKEAKKLLKIARKIGDRRAAFIAAAVLASLRRGQ |
| | LSEEAAKAALAVVKELLS |
| 497 | SKEELKREVAKLLGIPPEELEKLIELAERAAGGDP |
| | EIAELTLYLALARLGVPPEVIKRILELLKR |
| 498 | SEEAAHLVQVAAKRAGDKEATKIARKLVKLLREGK |
| | ISPEEVMRILNRLMERLV |
| 499 | DEDKKVSEKVKKLVRKAENANDPTQIFKLLRKALE |
| | LVMQVSDPTIHKEVATEAQRALFIAARR |
| 500 | TVRWEITVSFDRHNEEEERKARELLRRLLKKVHEW |
| | SRKRGLRNLYWRFETTRGDRVTIQVTSLSL |
| 501 | SLEEIFKVSFIAWRKGDEEVLKLAVRAIFAWLNGD |
| | PKTAEKLLRKAKKLLKS |
| 502 | TEQEKFKTTVKRLVDQALKENDPRLAVRVIWEALE |
| | EAEKKNDEDLARFVARLELKVSRWFA |
| 503 | PEEVAKMINKVAESQGDKKALKLARKILKLLREGK |
| | LSDEQAINELQRILFHLA |
| 504 | DASDIFRLLEIAMKLGDEKALRVLLRAQFALAKGD |
| | EELARKLVKKARKLES |
| 505 | PEVEIALFFAESVLKQAKRDNDSRSVRVVISILKR |
| | VIKKAQTEELRKKAKKLSEIAKKVEKS |
| 506 | DIQVAFTVQEVALQLLDETGDDSARKALNYATEVL |
| | FRAVEGELSEKDRKKLEKTLRKIEKKLRS |
| 507 | DDWTDHVEKLESKAMEAVKKNDEDTVKTIEKILKD |
| | LTKKAQDPKQRELAALAITEVQSLLKD |
| 508 | SLEEDLSRMARITFREAGATDVKVTIRNGKVTVEV |
| | RGDTPSVRAASRMVTHLAKHFGVDLKIRVK |
| 509 | TSRNRFTVEVNKKNEEERRLAEENLWILAAFARRR |
| | AREEGGRAKVRVEEHEDGDTTRFHNEVEVR |
| 510 | SEVEKILVRLENIAMKKGNREANRVVNHAYFAYKR |
| | GDIDEKQIRKLLKKAKSLLS |
| 511 | TRVFTWRFQAKNVHEQEIREAREHLKKLADHWLER |
| | IKRRGLRARVRTSSERRNNTHIIVVQLEVH |
| 512 | DEEHTKELFEEAKRIAEELNIEELKEFVAAALANQ |
| | ELARNIDDEEEARELTESAINILRLI |
| 513 | NSDELKKRLEKIYRLVEEGKLDPDKAEQIANEIWR |
| | EARKVGDDSVRQEALRVALYLHQFKK |
| 514 | SKDELITRNITELAKMAGVPHVEVRVSNGRVHVKL |
| | KGDDRHAKMAKRLVELTARFAGVDVKVTIR |
| 515 | DETLEKSLRKMLRLDPNMFELTVMFVLKLRGVSPE |
| | EIEKILRKVREIIKRDPEKAVEFVLRLIRK |
| 516 | TETHHFIWTIDGTNLRAAAKLTTLAAKEARREIKR |
| | AKRRGISVTVTITVRVNNGLAHVELILRLH |
| 517 | TEVEALSRIIEFVARVAGVPHVEVSWSNGKVTVTE |
| | KGTDHRVQEASPMALLTAMFLGVELKVQER |
| 518 | PTEEIQHLLVRILKKAAEDGDRRLLHAANHLYFEL |
| | EEAKKRNDEEKQKKILKRVRKLLKEAQR |
| 519 | SEIMELMTEAVDLGDPELLRLITLVAMAVAKGDPE |
| | LLKRVEKEVRELSRKNPLVRRLLKIIEKLK |
| 520 | SIQEEILRLQFIAFEQGDHKIARLALRAAEALING |
| | DEETARKLVKKAKKLV |
| 521 | DEKKAAKFLKKHLTERARRAGVSPKAIKKIQTIFD |
| | RLIKSGVDLLEATLIALKLIDKWRRS |
| 522 | DERVVMNASLLILALLNRGVSEEQIKKFVKRLLEK |
| | ERKSGKISEEAAESVKRLAKRLIKIARG |
| 523 | DLEKEAQRVLYLLMHLAMQIQDPKQRAKAQRIIWR |
| | LLEAVKKKDEDKIKKLVDLAKKLIKLV |
| 524 | SEIVKKLLKLAEKAVRQGKRKALRIVSTALFQLVS |
| | GDIDPDQARKLAEKAERILRS |
| 525 | TIEFENTIVLNGNSERVQKWAEEWLEEWRRKLSEL |
| | AKRLGLEIKHRIHRHRQGKFIVIHIHSRIK |
| 526 | PELDKIVHHALSLAAVIAFKATDPRIIRKAMKVSV |
| | LLMEAREEKDKDLVTKLLKKAQTLWKEVS |
| 527 | SVSILLLTAIFVAHEKGDEKALKKLQKLLRALQRG |
| | LTSEETAKRRAETILKRLRS |
| 528 | SLVEKIEKLLREGDPEEARQLALLLWLALHEKGDP |
| | RVELVRRLFRLLAKGDPEKAKKLAEELKRT |
| 529 | SIMEEIYKIQRLAEKLGDPKLEQIAMRAALAAASG |
| | DEKTIKKLRKIARKLIKS |
| 530 | SPQEAMELLFRAQYIARQKNDEELTHKLVRLLWLL |
| | VRAIKEGDKDTITKIERLAHEIYKKC |
| 531 | SLTETIQTSVTQAAKFAGVDKFSVTVANGSVKVRV |
| | RGTDDASNQLILFVRFLAHRANLPVEVEQE |
| 532 | NELEKKAQRLAHLLAEIIKKVPDPTIQHQAATLFI |
| | LLFRAIVKNDEEKLERLIKKAEKWIKSV |
| 533 | HRHYQFSVSVRGTDERAKKILKKFKEEVKKLTEKA |
| | RRDYNTKVTFRIRSLRFGDVVLVFVDIRVE |
| 534 | TEQKSEEIETDGTDEEAEKRAREFWERIRKQARRE |
| | ARNRGRKVFVFIFREEHNGHIRHSVYVVFR |
| 535 | DLSKELEQRVRKLEKKWQEGKIDTQEALTEVLTLM |
| | FKAEETGKLDPKYLEWLLRVFEEWLRRVY |
| 536 | TEMDVINRAIFLAHKNGDDKALRILIRITHLAMQG |
| | KMSEEQAEKRARRIEKKLKS |
| 537 | DTKKKSKELLEILERLAKRHNLEELKRNIEALRLA |
| | LRAAQQHNDEELIRKVDEIAEEAIRRG |
| 538 | SIRFKDYVQVSATDPHQVTRAKEIAKKFVKKVEKE |
| | ARKRGLSVSYDVFVRRYGNRVFIVVVIEVE |
| 539 | PETVELSIRLKDTDEEAEKRVEKWLETIIKKLEEK |
| | AKKLGLRVKVRKFKERRGSTLIIQVRIEIE |
| 540 | DRKEVQREVKERVDTALSNNDPRTAAQVVLDASRL |
| | AEELGDEELLRLVSQLMFKIAEFQG |
| 541 | SSEELKRLLDEARRRGDADLAAEVAWKAAEEGDRE |
| | AIEAAFRLQYELLN |
| 542 | DDWTEHVKKLVKDAEEAVKKNDKHTVVRIWLILFR |
| | LFIKAQDPKQRKLATRALALVLHLYKS |
| 543 | GPEEAKEILKKINSPIAREVLRLLEEAERKNDPRL |
| | LEEAILVALTAAFAGIVSPEVERLIVEFVE |
| 544 | NEQKMIETLIRSAIRDGNERQFRELVKVAKKHGLL |
| | SEDTLEQLKKEFKREKKY |
| 545 | TETRKITITVPGNDEKAKKILKDIVTKIKKDAETH |
| | AKKRNLRVDIRYNTLEHNGKITVTIVVIFK |
| 546 | DREWHAHIDVKGTDRRAKEIAEHWALTWAFRILLR |
| | TRRQGLESHVSIKVRRDGDTVRARVTVRAH |
| 547 | DVRTLATRVKQRLTELYKLDTPEARKEVIKVWFKL |
| | MEIYSRITTEEEAKIILEAVLVAISVLLG |
| 548 | SDLARLMKLSQRAFEAGVPKAERIILRAMFALHEG |
| | KLDEKQLRKLQKLAEKLIS |
| 549 | SPDEIATLVRKNVEKLRRTFDNDWKRQAKLTVRFA |
| | ILLAKKNNDERLVRLLKTILKQIEKLSQS |
| 550 | TELVEITLMFASRHNPLAKELLELLRELKEEGKFS |
| | EEELIKIIVKRAEELGNPLLARNLEHLERV |
| 551 | SSEEIKHLIALVAFIFHKKGDRRAVEVWNRLFRLL |
| | ELVRRGTLDPDEQKRLLKELKEEVKKL |
| 552 | SERYTFEVTEDKNDKEAEERARQKLLLFWARVAFR |
| | AERLNRSAEVRVRTSEHNGTIRIHVTIEIK |
| 553 | SEELLREVVERLGVPPEVLEVETKQLRRLEEDGIP |
| | PEVILFTLALAAERLGDPELAELLAHLAAR |
| 554 | SEEIEELIRELEKKARNPEVKRVLALLYLALKKAR |
| | SPEEREEIERLERLIEEDPRLAREILKKLD |
| 555 | SWKDLLAEINSAFMKGDEKKVKKLKKIAEKRGDER |
| | AAHMAESALRQLQRR |
| 556 | DELINEIIQLAVKDPEKAKELIKEIVKELRKKDPR |
| | EVKLFLETLLLTLRFLGDPELVKLVEKLLR |
| 557 | LDEEKRIKTTVERLVKHFGLSRDIEKTLKKVVEKL |
| | LKKGVDSEEIALMVSMLAQRWAERLH |
| 558 | SEIEKKLRKLKKKARELGNKEAALAVQQAIQAYRE |
| | GRISPEAAKRLAEQAERILRS |
| 559 | DEEVEKLLRRAEKLLKEAKKKNDKEKLREAAHLVL |
| | RAAALTQSDEDLKRAARLAMRIARLIN |
| 560 | DEHELQRLAWLALELGDEEIAREAFRVIMKVIEGK |
| | LSEKQAEKWAKKIRKKLSS |
| 561 | DSEHMVELTARFLAKRVGVPDVKIRKSNGRITVTV |
| | KGNDESAQIFSRVLKHMAKRLGVDVRVQTR |
| 562 | DKKYNELLRLLWKALELGDEKAARIAFRALVKLWE |
| | GKISDDDYKKVQKLITKALRE |
| 563 | DEEVEKLLRRAEKLLKEARKKNDKEKLKEAAKLVR |
| | KALRETTSEEDRIRATRLWLRIAELLK |
| 564 | TLDDVMLRAVESQARKLIKKSRDPNAQSKLKKAIK |
| | IIQKASQVSDPNIKKSLVQKALTVVMDAA |
| 565 | SEEVKKILKRIVKLLAEQLGLDEKAQKIAKKVAEK |
| | LADKGVDPLEATLILVRVLDTILRRKK |
| 566 | DEELKTIMNIVNRLMEEAWRNNDEKSIRLAWTALQ |
| | LLMRAHNADEEQQKKLKTLVKQLIKKIK |
| 567 | SEVQELVEEVLKRGNLEELIKEVLKLARELGDPYL |
| | EAAARDALELVKRDPERASFILVLVLEELK |
| 568 | DKEEIRQKIMNLAFAANLRVQDPRIKKTIHTVYRQ |
| | AMEALDKDDEDTERTLLKIVEKLLRDVHS |
| 569 | TEHYRWTVRVEGTDREAHQIIDEFIARILNEAFRI |
| | ALKDTSHIRITVHTKVKDGEIRVEVRAERR |
| 570 | SINEDVQVRDENNHESVLVQVEDPTEAEQQVLLFL |
| | MELGVTATVRVDPDTGSVEVQQ |
| 571 | DDEELQRFIQRHVEETVGAPDVQVSVSNGTVKVTI |
| | DGNNDAAQAVRFTAELAKQKAGRNVDVTTR |
| 572 | HEEIANKLSKKVAEILDQQNASDEQKSKAHEILLE |
| | ASLVLTNISDKDKAKSYADKVTKDISNM |
| 573 | DRLAYALTLSRSLLRDAKARNNEELIRLAEETSRL |
| | IEDARRRRDEELARRLVHKLLEAIRKA |
| 574 | TLREEAMKLAMEAMKRGDEKALRKAQRALFLMARG |
| | DISEKQAKKIIKEIKKLIKG |
| 575 | SETYKVTIDFDGKDEDTRERAELFARYFRLRAEEE |
| | ARKRNVEVRIEIRFDTRNDKLKTDVRAEFR |
| 576 | DEEVLELVEELLKQGDEEEVEKLLAHVAARLKEKG |
| | DPEKAILVINVWLRLKKNRERALEALKRVP |
| 577 | DRETEIFEFFAKTTIKRAVEENDEERLKELEHAIR |
| | REYKEAKKRNDEDKLKVAKRLLEWEKKEV |
| 578 | DLEEELEEALKRGDPELLKRIVEKIIKKLGLPPNA |
| | EYSLKWWLEFLLRTKDPRAREAVESQVRHG |
| 579 | IDDVRWAASNARAYWARLGDDTFDKERKKLEKVEK |
| | KVKEGKLDPEQARKFALEVERRLVKLV |
| 580 | VVIIFVDNEELAKQVEEVARRLGVEVRVSKQGDLV |
| | VVTLQVRDPTLAKTAASVVPEARVHEF |
| 581 | DEEKKELHKEIERLLKELLRHAKSEVEHLAAASLL |
| | QLHRKAWENNDDELWEESKEKLEDARHALR |
| 582 | SVVVVVEDERLAKLVSKLVNVQRESIFTFGNVVIL |
| | NLQGVDPELAKKAVKTANKDASVLVF |
| 583 | QEEVHRTLLNLFLMLSHNARDPNLQEKAQRLARKA |
| | LQAVDKNDDDTIKTLLKLLKREVDEVRS |
| 584 | SEKDVKRFIKKLLDEARKKGLISEALKESLKRVAK |
| | ELLKRGISTEEIKRILETTARFLAKENK |
| 585 | KDIEKEIKKVITTARRRGDELLVAQALAVAHLERE |
| | GLITDEEAKRLAEELKELLS |
| 586 | SEKDVKRFIKKLLDEARKKGLISESLKRQLKHLAE |
| | EALKRGADTSEIKKLLKIAAKVTAEFLK |
| 587 | SEEERKRLLEALERGEVSPYELALRLQRLAYENND |
| | PELLNRATKVVMMLAHGDPRAEELLKELLK |
| 588 | SLEEVVEEAAELLNDPALRELVELLKEARENNDPE |
| | LLTILVINVWLRLHELGNPELARRVAKLRP |
| 589 | DEEESAQRLVKRTAEMAGVPREDVKVSNNTLTLDV |
| | TGDDENVRDVTMNAHTTAHLVGLEFRVRTK |
| 590 | SIEEQARRVVEHVARRYNVKDERVSVSNGKVSVTF |
| | KGDDEAAKRASRLVELTAHLAGIDLKVTVR |
| 591 | IELEEKVEHLASRAMSVAMENNNREELRRVNELYF |
| | KAEELSSSPDPKESKEALDRVRKELEKIV |
| 592 | SREEELLELVVREKDDPKVILHLLEELLRLAQEKG |
| | DPDLEQLVAELFAILARDEERVVELAEKLR |
| 593 | DESLKKFKSDVEKKAREAKSNNDEKRLSEIVEEVL |
| | KFAQEAQNNNDQESASVAAVALFLVFKIQ |
| 594 | DEVLEASYLNKQLLELARRLNLEELVRLAEKSLRD |
| | LARAALNNASEEFKKTLVELSKELEELIK |
| 595 | DDEEAEEAKKLVDKVSKTNPRFREQAQLVKKNLTR |
| | AQRNKDKDDVEAAILLIISNYNVAS |
| 596 | DKREEVKTLYKILEEAAKKRDEETIDKVAARAYHL |
| | AVEIGDRELLLKIVSLWMHAQELLS |
| 597 | NEAQEKAAEIARTLAEKARRLGRPVDVSVRFKNQT |
| | LTVKVGPDPKEAEEAAIRIFAALFAKLEG |
| 598 | DLRFTFSVRDDSDDERSRRQSEDLAKAFVETAALA |
| | ATELGLELRFEIRRLRDGHSNEVRVEVRIT |
| 599 | SFAEMVLEYLEKAGNPEAAKAVRVLLELLKRTGDP |
| | RIRNLINQIAWAVMEGDPRREELIRRVLEP |
| 600 | SEFVIITVELRNVSPEQSKKAEKKLKDIAKKLTKT |
| | AEKRNLEVRFRIKEQSHRGTKVLIFNLVVR |
| 601 | SEIEEVLELIRRYDPRVVEMLLVSLMELKHMGASP |
| | EEILKYLLRLAKILGSPLATELLRRLLEKR |
| 602 | SEVRALTLALQVELLAKKVGDEEAKEAAKKABELF |
| | RRLREGKLDASQVEKLLKRITIKKLRKLG |
| 603 | RRHWEYRIRVDARDERQRREAKALASIIATRLWLR |
| | SKEQGQENHFHIREERHGEDLTFHIRNETR |
| 604 | SKDELIRRNVEFLARVAGVESVSVDVRNGRVSVTL |
| | KGDNEAAKDVKNQLELFAMFANLDVKVNIR |
| 605 | SKELEKVIKKVNKKAKKLGVSPTAIKDIERFIREM |
| | YKSGLASPEEIEKEADRLAKLSAFLAR |
| 606 | DQLEEAIRRLLELVPDPRDVVNQIELFLRFMNSPE |
| | AREALRLLEELRERGVSPEEIVEIVLKIAR |
| 607 | HLHLRFSFHSEGDSERSERAAEQFAEAVRFTAALA |
| | ARRRNLEVRVEIRIHIENGRTHVEIHVNIS |
| 608 | SETENVTFEIDGTDERAEEQIRRIVEKERRRAEKH |
| | AKKRNLRPHVHVLTIRINGKLLLIIVIVER |
| 609 | SEEAKRELEEAKKRGNLERHLRSLLFALAAFLGDP |
| | EEATKRLEEIARSINDPEAEKLVKKLSKET |
| 610 | TKEEKLKKAKKIVTTLAKLANVDPRQIKLLQSLVK |
| | MAWEKDDPFAKTMVEVIIRQLKHMVDE |
| 611 | DMRERSVEEMLRIIETVARRRDDPTAKTLVKRAKK |
| | ILEEARRKNDPKLLRKALRLANRAYFSLK |
| 612 | VEELKKAQKKLDKAIKILRKKNDEMAVKLAEAVKR |
| | ELKKASSDSDPRTIHRVIFVAVNAVRNAQ |
| 613 | TSQREDRNEFQPENEEAERLEKRAIRQAARAAVQR |
| | IRQQGIDVKVRERTETHNGRVTLSVTFRHR |
| 614 | DEKDDFSRLVKLTLWLAGAKSVDVKVKDGTLDVKV |
| | EATDPSVEFASKTLTKWAKDQGLRVSIKID |
| 615 | VEELKKAMKTVQRAWTILMDKNDIEAALEAVSVEM |
| | MLAKASSDSDPRTIKTVIDLAKQVYKKAT |
| 616 | TNEEVVEHLARFNPRNLELTLREMLELARREGNED |
| | LVRVLEIVERLLEEGVDPEEVVRVFKELLK |
| 617 | SDETKRLQKIAKKALKLLRQGKLDTHEALSIVMEV |
| | IRIALELGDRKAVQVANSIAFLLIKIEKG |
| 618 | DLRKVTRLIWAIAEIAKRKNDEELHKLAARAYAEY |
| | AKARRNNDEKKSKEVTKKVEKLWKRAQS |
| 619 | SKELEKVIKKVNKKAKKLGVSPESIKAIERNIRTL |
| | YKLGLLDPEEIEFFADMQAHMAAKRAS |
| 620 | DEEDKKFAEKVRRKALELIHKDTDEETRIHLINLW |
| | LRAEAAQKTTDSEARRLFKELVEELERRD |
| 621 | PEVEELLVMAEIMLKQAKKKNNHMLVRSVLRILKE |
| | VIKKAQTEELRKKAKKLSEIAKKVEKS |
| 622 | RIEIEHSVLIRGDSEEAKKRAEEHQERFRKFAEDL |
| | ARKLNRDVEITFFITELNGVIHSIATARIE |
| 623 | DETHKLYITVLSLARQAMSKNPEYHEEVARLYVKI |
| | FRLWEKGSPRVNEVLKKAEKILRSIIG |
| 624 | DSKTIAMLRVLIRIYAKRKQIPEIEKLAKKVDKLL |
| | KLVRKGLLDETEAEKRAARLWFLAVSY |
| 625 | HLAEMIKHLAKREITKAVQNNDEHKVELVVFFLKN |
| | AARSVDDPRLEEEIKRIVQTVLEQVL |
| 626 | DPDEILDKVANTLLTLAFQHPDDPELHKAFSMVAE |
| | ISQKAKKLSDPTQKERLARLAQRILEEVS |
| 627 | DEEVAMTVSKVASMLFLQTGDESAVKAMHFALQVI |
| | TRAEKGKLSEKDRKKLEKTLRKIEKKLRS |
| 628 | REQFFFFVRVNGNDPTQKKKAEDKAEXFRQKANTT |
| | AKRKGKKVRVTHSSSTQDGKYVVLVVIRVE |
| 629 | SEFIRELLRVAKELGDSVALMFLEQLLELLERGEL |
| | SPEDVLRLVLLTLRFIGNEELVRLAEEVLK |
| 630 | DLDKRAKIVLSLARHLRKKVQDPHIRKLLEHLAKI |
| | LEEAVKKKDEELIKKILVLVERVIVEAQE |
| 631 | DEEEKFRKTIEKIAKKLGVEQVFVKVFQGQFVVFI |
| | VGDTESARKVQKLAKEVAKKLGVRVRVRIF |
| 632 | DKELKKVINKVMKKASKLGVSPEAILHIAIQIQRL |
| | FREGKLSPEQIEKWADKLAKKIAKKAS |
| 633 | DMHEEAIKMLLRLLETARKEAPDPEKSKKIDKIIK |
| | KAKTWSSQVSLEESANYIFDLVVKVQRE |
| 634 | DEEERRKISERLKVDPKVAESLLRIKKWLERVLDP |
| | EFVRHSLLMFIFLLLKVDPREAERLLKLLE |
| 635 | SSTQRSEITVQARTEEEAREAEEELRHSAEALAYL |
| | ARRRGVDVKLEIRIERRGKRIRIRIRFELR |
| 636 | SSEELKKKIKKALKDGDRRAVTEIAMLAQELGDRE |
| | LARIALEAAEKLAN |
| 637 | DPTSKKLKKEIKKVLKLEKKGKIDPVEAWNLLERL |
| | IEKARRIGDEEAVQLAMHAIAIILHAMKS |
| 638 | DKDESFRRIVEWIARMLNVPDVKVSVNNGKFHVHL |
| | KGNDENAKDAERLVRLTALFMGVDVKIDLQ |
| 639 | PREEILHKINHLYFKAHEDGDKKVLKLLAKLLYKL |
| | MDAVRRNDEEKQKKIAKEVEKLEKIVQR |
| 640 | DERRTFTLEVKGTDEKAKEKLRRFALEVQFRVTTE |
| | ARKNNRTVRVHVRVERRGDKIRVKIDVTIR |
| 641 | DPSEEVTKTVQSILTEALKNKDKELVHKAIRIALE |
| | AARKINDPRIQEVITEAFTVALAVQLG |
| 642 | SEEELREALKELAERGDLHAAARVLNSLLFLLYEK |
| | NDPSMRKVAEVMIRANEDPRRLPELIKLVH |
| 643 | DEKLRKIMNWLMKEAAKAGVSRELIMRASMKLMMA |
| | YEKGKIDPKKLAKKLLKELRKEVKK |
| 1563 | GDRRKEMDKVYRTAYKRITSTPDKEKRKEVVKEAT |
| | EQLRRIAKDEEEKKKAAYMISFLKTLG |

TABLE 4
H3 binding polypeptides

| SEQ | |
|---|---|
| ID | |
| NO | Sequence |
| 644Z | SEHEEFLEWLLRKIEEAIKRGNKISAEFLIGLAKQ |
| | FLHVINDDEIRRRLERLERLLH |
| 645 | SQHEKFLEWMLRKIEEAIKRGNKISAEFLINLAKN |
| | FIHVLGDDEIRRRLERLERQLH |
| 646 | TEEEIEEVEELLKKATDPKLRHMLEFLLRRLREAL |
| | ERNNLLSARFLLGLARQFYKSI |
| 647 | TRMRISVKFLLGLARQFTDPRIREWLLRRAERLAR |
| | EGNDPELEELVRRVEEELK |
| 648 | SKVKLSVKELLGLARQFYRAGNPEAAEYLIKRAKE |
| | IAEKNNNEELRKEIEELEREIR |
| 649 | SERNEHLLRWLLEKIRKSTNEISLRFLLGLLEQFA |
| | RAAGTEEAREILREAEEIVK |
| 650 | DERSSAKISVEELLGLAKQFTDPRIREWLLKRAKR |
| | LAEEVGDDELKRLIEKVEEEL |
| 651 | TKERVEHLVKWLLERAKRMPSPISRKFLLGLAEQF |
| | ARAGNDPELERLVEKVKREL |
| 652 | DQAKRMVEWLLKKAREALKLGNEISVRELLGLAKQ |
| | FAHANNDEEAERLVREFEKEL |
| 653 | DLREKLKSMVKDLLRKAQESQDPYYARQAEILIET |
| | IRKLAKDPDVQRLAQEALESLRKYL |
| 654 | DDIQKEAKKVIEQLQRIAKTFPDNMNVRYLVMLAE |
| | RFAHAAQRMNDEEALKLAKRLLEKAKKAG |
| 655 | SLEMAVKWLLTVLKRLRDKAQDPTSRKLIEELYKK |
| | VEEAAKNKDPRAAHLAFYAVAQARMLV |
| 656 | DMITIAIKLATEVYRLLVEGNYDEASKLAKKAIEE |
| | ADKKNDEDLKKFAERLLERIKKLKKS |
| 657 | PEETYKRATKILTEAKKRAKDNPEIQRMIEMYQKM |
| | LEYAYKINSEWALREIAHLVENAVRRLLS |
| 658 | DRMQVALKVATAVYKALAHNDPDKAKKIVDDAERL |
| | AKELGDEMLERLVKKLKKRVEDEKG |
| 659 | DETVIKAVMHAYRAWMQAARENDEDKAKKIIKSLK |
| | DLADKLNDPYAQRAVKNLEDTLKKLKG |
| 660 | DEEIEKVLEEVLGNPWDARVLAQLVRALQKLINID |
| | PEEAIKILIESLERMGNPEQAEALKEVLRH |
| 661 | PEDEWVKQVETILRKAKKVPDPTERKKLLIEAQVR |
| | ARYAQQVATDPRVQKILEELIKIARKLYV |
| 662 | DENQYQRAYDWAAEWIRRVISASSEEESEKLIEKA |
| | KEEAKRRGDELALRLIERFQKLWRKNL |
| 663 | SQETVKDLVRKAKELADSLGDPISQEYVSTLEEAA |
| | RRATKNNDEHKLRILRISLEYELKQL |
| 664 | DLDERAKKLLKLLREVRKKAPDPDLRKKAEMASRM |
| | LEEALKKKDELYVQTLIRFAEVFVKLV |
| 665 | PEVKKKADHILKLLEEAMKKTKDPEVVQELMHLWF |
| | RLVWAAKEQNKEMLDRAAKHAKELIKKTS |
| 666 | PYQVTVHGRSETQTTTVSSYTEAWRWAYRAAKRLG |
| | LKITRVEFKDGTEHFHLE |
| 667 | SKELIYRFAIRYLLKEAGVPSFSVDVKNGTETVTV |
| | QGTDKLADYARKMVKEFADKAGVKVEIRTK |
| 668 | SEEELIEKVERVLGDPRLRELLRRLVEDAKKMGID |
| | PKMAVQVAARYIAQQEGNPEVEKVAKEVAK |
| 669 | SEDEKLEEKLKKIARIAGVPEFTISRSNGTLTVHE |
| | RGTDLAAQVLERYARQLAKSLGIPLRVEVR |
| 670 | SEELKKKLREALERGDRRAAAQLLYRIWAQARLRG |
| | NEEEARRHIRELLKEFGDPLLRYYLEYLEK |
| 671 | DESLKKWKSDVEKKAREAKSNNDMRALIRIATEVY |
| | RYYIHARQHNDEEAQKVAEEAYKLVRKII |
| 672 | TEEYDIQYRARAQARIAGVPSFSVRVSNGHLEVTL |
| | EGNDESVKTAKKAIERFARMRGIPVRVTTK |
| 673 | SEEEEKLIRIAAGGDPHAAFYILAQLRLLKKGDPS |
| | AKMLLERLKEELEKLGNPERAEALERLLRK |
| 674 | DLQKEIKTVIDLIKKIAKSKDNEMLKRAAKMLEEA |
| | WKKAAKLNSEYMLRQLLRMAEALLKRA |
| 675 | DETQKQALERYAEQVARYASRERASRALEMLIKIL |
| | EKQNNEELVKVARKLLEWVRKYV |
| 676 | DKEEAKKIIEEATRRWRNARSHWEQEMILIHAALL |
| | LLEAASDAREAKHWMKLLETVLKND |
| 678 | SEDAKDKFREYAERAHELGVDRETIKYSLEAILRI |
| | MVKYGFLSPEEAEKVRRWLEEYLDKY |
| 679 | DKYEKLLKILKKLAELALRNNNPEVARWVIHAVTV |
| | LYRAKVRDDPNLKEKAERLTRTAQKLV |
| 680 | TEKRKWIEKIRQLLHELMKLGLDPREILRVATHAY |
| | RLLIEGVSPSEVKKWVEKVVKEVKKRI |
| 681 | SEIKKKWEEVSKKVQKIAEQLSPTQRYLVELHARK |
| | ARKLLENASSEEEKEKVLKLFELVARIVI |
| 682 | DYQKLEKRVKTIVTLIKQLKKDEWEEKAAERILRL |
| | AEEASKKKDEEKLQTLIRLAELIVRAAKR |
| 683 | DTSEKLTKAIEQYAREVGAPSVRVSVSNGKVTLTV |
| | RGDDERALKVASYAYFAASQAGIRLEIRIE |
| 684 | DETELARRLVKWLLSMVKNASNKMNAEYLLRQAER |
| | AARSVNDPTLQEQITRLKKWVEKHER |
| 685 | DDDSHKKKLEDELESLIKKARDPEARKMVEWLARE |
| | AKKAADLGNKISAEFLLRLARQFAEASAR |
| 686 | DRKEQIKKELKMVKERLDKATSREQIEIIVQSAKR |
| | YAEQANDPEAKKVVEKLEKDAKSKG |
| 687 | DDRKKVEDTLRKAYKEAEKHNDVHKLFRIVWLAKY |
| | LAEKEDDPELRKVAKQLHDTERKWIK |
| 688 | DPRKEAKELVDRAKTLAKQVGDEHALKVIKKLEEL |
| | LKKAIDNNDEKTWVYAWTVVRIIILVLEK |
| 689 | SYLELLVELVKRVDPELAEEVERLIRELKKQGISP |
| | MLILYKLLLIATFLGNEELIRIIRKVLHEL |
| 690 | DRATKMVRDISKKAETAARSGDRQRAQALVRLLEI |
| | FARAYPESPVSEEAKRVIEKVKKLIDS |
| 691 | DEDLKLANIAYYLASQAGADHFEVRVRNGRLTLTV |
| | KGDDEKAQKVRKHVQTHEDKLGVDVKVTYK |
| 692 | PLEELIKTLQRLARELARKVPDPKNRILLWKVMTL |
| | LYLAQIISDPNQSKTAVDRAKEILDRVRS |
| 693 | NEVQKRAKRALQLLAELLKKLNVDPKMVRQNLQRY |
| | AKTLQRYIQNPENRKFVQTVAEELAKRVM |
| 694 | SPDDVKKLARIVQKLAKEKRDMVAWYYAHQVYRLA |
| | EVAKRENDKELADRLKEKLEKLVKKL |
| 695 | SELERLLELLKRVSPQLRLLVRMLEEALRRNDRMN |
| | ARYAFKLVVRVLRALGDPLREEAERAARKV |
| 696 | PEEARKLIEKLKKLMKLAKEKNDPELVHIAIRLAL |
| | LEWRAAQRNDEETLRKLEELIKEVEKRLS |
| 697 | DEYVKKIIEYLKKELRKIGDSEAEERAERHLRELE |
| | KRGVDALKIADWAYYWLFNARVRKG |
| 698 | DPTEIKRRVEKLAKELYKRGISPVLAALIVYRHLT |
| | QLVREGKISPDEATEAQKVANKVAKREL |
| 699 | SLEETVEELLKRLGVDPRLVYSVKAIIRIALRYGL |
| | SPEEILKLIIRYLRRAGDPEAAKLIEELLK |
| 700 | DLEEIARKAAKLAEEAYKKNDEYMRRLALMMLRSV |
| | IKYASRYDDPKYKEIRKLAETVYKKVKHG |
| 701 | DEVEKRIRSLLERIQKLLRHASPVARRYLLELARQ |
| | ILESLAHSPDDSVRKAAKEALERERREI |
| 702 | DPRKKLKELVDRARTLARQVGDLRAYRRVITLAYL |
| | AKMAIDNNDERKLKQAEEALKRIIKKLES |
| 703 | TEEIKYATKVYYAAVQAGVPHIEIRISNGTWKVTV |
| | EGDDESAQYVLKYAKTLADKLGVPINVRVR |
| 704 | SEEERKEKLRKVIERAARLVGISPEIIKRIQKEAD |
| | KIFDKLSLLWAAHWVYRAIFEYKRQL |
| 705 | ERVKKMVDTLLKQAEEAVKRNNEYLLEQIKRLLES |
| | IEKLARDPNQKKLARDALETIRRLE |
| 706 | NEELNAKIIERVAEGDPDAHYRLRAQIRYARELGN |
| | EEVLKILEEALELWEEGDPDKVRELAERLK |
| 707 | PEHEKIVQHAMELAKKIFEKASNPEIRRKALHVAL |
| | ALWRALMRNDKDLATKLLKKAQTLWKLVS |
| 708 | DEQEEEDVRHLAELLYRLATQIPDETKAKKLLDNA |
| | YRILKEAQDPREAKKLLKELYEKAKKKA |
| 709 | DKKEELLKILKKALELLKRSGASEEQIRTYAEQWY |
| | RAVAQNDEDQLRRLEKIARTVEKRL |
| 710 | SREEELKAYNTAYYLAAQAAEDEDAERKARKILDK |
| | HLKDLKVPNAEEFKKLHDRMVKMIRSDQS |
| 711 | SLSEKLKTLLEQAERAANIPDEDKSRTILKKAEEK |
| | VRKLLRHPDPSVYQLAYKILLILTELF |
| 1564 | SQHEKEAEWMLRKIEEAIKRGNKISAEFLINLAKN |
| | FTRDPELKRRLERLERQLH |
| 1565 | SQHEKFAEWMLRKIEEAIKRGNKISAEFLINLAKN |
| | QTRDPELKRRLERLERQLH |

TABLE 5
IGF1R binding polypeptides

| SEQ | |
|---|---|
| ID | |
| NO | Sequence |
| 712 | GSSTRNAEFIVLLAELCAKSQNDPSLQEYVKKVKK |
| | IVESLLSNGDEKSAEEVARKALEYCADGGS |
| 713 | STRNAEFIMLLLELCVKSKNDPQVQEYVKKVKKQV |
| | ERLVGNGDEKKAEEVARKALEYCADG |
| 714 | DKELLERVVELLRQGNPEEARKLLRELLRELAELG |
| | DPLKRLVFQLLVLLAAGDPEWKEILKKLEK |
| 715 | TAEELLEIAVKDGNPELLRAMLRDIARASALAGNL |
| | EELEKVLERLLKEVGDPIFEEAIRLVKELH |
| 716 | GSDETCKEAERNIEFLALLAKLLDDPEHAERLLKQ |
| | AEELAKKCNDPRLEKLVKKLSEEVRKYVGS |
| 717 | SEELEKKVKEAVEEGDPVIVELLLAELLAETGDPE |
| | VEKLERLLQEALRRDDPDLAREVLELVKKT |
| 718 | GSDEKCKEAERNIEFLALLAKLLDDPEAAEELLKQ |
| | AEELAKKCNDPRLEKLVKKLSEEVRKYVGS |
| 719 | DEEVRRLLKELLESGRFSCFAVVLLVSVDLIAKGI |
| | PPEEAAELVERAIKKLGDPCLEEALRELRT |
| 720 | SKIEKAIKLAKELGDPDAVRILELVKEFLEEGDPE |
| | RAKALLRFLILILRQFGDPELVKIVEEVLP |
| 721 | DIVEEVIRKAEELGNPHVARLIEFLLALVKLAGLP |
| | PEELIKMLEHALEIEGDPIIRELIELLRKK |
| 722 | SEDDKKCKSVEDKARELIKKARDPLVQRALKAAIE |
| | LIQKASQVSDPENKEFLCLLAKLLVESAIG |
| 723 | DEELEKAVELARRLGVDPEALKALLRAIKEALERG |
| | DKENLEFLLLLLELIVNDPEVRKLVRKVIK |
| 724 | DEEVRRLLKELLESGRFSPFAVVLLVSVDLIAKGI |
| | PPEEAAELVERAIKKLGDPDLEEALRELRT |
| 725 | SKVERLIELLKRLGDPNLRHLARALEEALRNNDEE |
| | NLEFILLLIELVARALGDPEVLKLVREVLK |
| 726 | SEDDKKLKSVEDKARELIKKSRDPEAQRALKAAIE |
| | LIQEASQVSDPENKEFLVLLAHLIVEAAAG |
| 727 | DDREFVAELILWLARENPENAEHLCEAIVKILGLS |
| | PELEELCRRIVELVERGDKDKVEELLRRAK |
| 728 | PLAEESVEIAKREGNLEEAIEFLLLLARLIGNEEA |
| | VRLLEKAKELLKEGDPDKAEELVRRVLEII |
| 729 | SDETAHRIIRRVLEICDKRGDEDCSQKVLRLAILA |
| | RSDAHHASSEEEASRIWQDAAKKVQKLESG |
| 730 | GSDLEDLKKEAKKLEKWVSNCRDPLLREAVSRLIE |
| | DVKKAADKGDKHNAEFAVLLAQLFVKSCGS |
| 731 | SDEQEEIRKKVQETLAELIKKCQKDPETAKKEVKK |
| | LRELAERLGDEELKPNVEFARLLCELLEGS |
| 732 | SREEEAVRESLREALEEGDPRTVSLALAICRIILG |
| | DPDLCREILREIAKELGNEEVVKEAEKLLP |
| 733 | GSDWRQAEHILRFIQHIARAANDEDALKRATTLLK |
| | QLQEATKKGDEDTVKRVIEEAEKLLRRAGS |
| 734 | SPLEEEVKKLVETAEKAAKDKNDPHAEEAVKSLDK |
| | LFKEAKKKNDEENLEFVSLLARLVLRAVIG |
| 735 | SEEAKKVLKFIKKAEKEARDANDPVAVELAHEALK |
| | LAEDAARRNDKEALRQAEFLAFLAAFIARS |
| 736 | SKVERLIELLKRLGDPNLRHLARALEEALRNNDEE |
| | NLEFILLLIELVCRALGDPECLKLVREVLK |
| 737 | SEEDELRKLVEELEEKARKVIRTEEQREAVESLID |
| | LAKKALKNGDKENVEFLALLVHLLIEAGGS |
| 738 | PEIEEKFEHIMRLLPPEDIQLLIFLLMVASEKGTE |
| | EEVIRYFVELVEKLGDPKEALKLLEEYVRR |
| 739 | PEIEEKFEHIMRLLPPEDIQLLIFLLMVASEKGTE |
| | EEVIRYFVECVEKLGDPKECLKLLEEYVRR |
| 740 | GSDWRQAEHILRFIQHIARAANDEDALKRATTLLK |
| | QLQECTKKGDEDCVKRVIEEAEKLLRRAGS |
| 741 | GSSTRNAEFIVLLAELLAKSQNDPSLQEYVKKCKK |
| | IVESLLSNGDEKSAEEVARKCLEYVADGGS |
| 742 | SDERERLREAVEELERLAREENDAFIAALAVLLAR |
| | SALEQDKDDELSRRLLELAEKVARELRSGS |
| 743 | SEALQILLRSARHHGDEEVVRVLERVIKLLEDGDP |
| | DSAEKLARELLEKTGDPIIRAALELLKRLK |
| 744 | SEELEKKVKEAVEEGDPVIVFLLLAELLAETGDPE |
| | VEKLERLLQECLRRDDPDLCREVLELVKKT |
| 745 | SDETAHRIIRRVLEIADKRGDEDLSQKVLRLAILA |
| | RSDAHHASSEEEASRIWQDAAKKVQKLESG |
| 746 | SCIEKAIKLAKELGDPDAVRILELVKEFLEEGDPE |
| | RAKALLRFLILILRQEGDPELVKIVEECLP |
| 747 | SPEDKEKARKILQSVLELVAHNQIDEKIASKLISE |
| | VKTLAKRVNDPQLLRNAEFVELLVRVLYRG |
| 748 | DEEVRRLLKELLESGRFSPFAVVLLVSVDCIAKGI |
| | PPEECAELVERAIKKEGDPDLEEALRELRT |
| 749 | GSSTRNAEFIVLLAELLAKSQNDPSLQEYVKKVKK |
| | IVESLLSNGDEKSAFEVARKALEYVADGGS |
| 750 | GSDLEDLKKEAKKLEKWVSNLRDPLLREAVSRLIE |
| | DVKKAADKGDKHNAEFAVLLAQLFVKSDGS |
| 751 | DEEVRRCLKELLESGRFSPFAVVLLCSVDLIAKGI |
| | PPEEAAELVERAIKKLGDPDLEEALRELRT |
| 752 | NEKEVIEELLRDGNCLIATALALTVEREINTPEAR |
| | ELLKLLREALERRDPELLCRLLELVLELLK |
| 753 | SDERERLREAVEELLRLAREENDAFIAALAVLLAR |
| | SCLEQDKDDELCRRLLELAEKVARELRSGS |
| 754 | GSDKELAKKAVKELLETALQQGDEENFEFAVLLAK |
| | LLARAVNDPDVERIIKELEKKEKDLKKSGS |
| 755 | DEEELKELAKRCGIPPEEVEKVLRKLEEHEGNPEA |
| | AKAMLFLALAACVYDPDSPTARVAREIIKK |
| 756 | SEEERILKLLEEAVRRGDPELLEELIRLLSELLGD |
| | PRNALFLAALYAIAAGNPEAEKIVEELRRR |
| 757 | SGSSKEDAEKLLEKLVEAARRNDDETVTKLQQLID |
| | EICKKEQDDNVCFLALLAEVLLRSLKRGSG |
| 758 | DAERLIEIIREIHKKNPEAARLIFLILFLLLLLKD |
| | PELRKLYELVREAVEKGDPELVRRLEKLVH |

TABLE 6
IL7Ra binding polypeptides

| SEQ | |
|---|---|
| ID | |
| NO | Sequence |
| 759 | HEVQELARKLWHATEKAEKRNDEKAVKLLEDASVL |
| | LVNAWLSNDEDLKKKANKYAKTVIKQAES |
| 760 | SVKKKVRKVEKKARKAGDELAVLLARRVLEALEKG |
| | LVSEEDADESADRIEEALKK |
| 761 | SVIEKLRKLEKQARKQGDEVLVMLARMVLEYLEKG |
| | WVSEEDADESADRIEEVLKK |
| 762 | DEVHKLAEKAARLALKKGDWDAHAKVVNVFLALKH |
| | GIISKEQAKKILKKIIEEILS |
| 763 | DDTKLARRKVKLALTIVKNASSKEEADRALHIAEI |
| | VADEVNEPTLQEQVTRTKKWVEKYES |
| 764 | DYREVIKKAAHLAAKKGDEDAHAILVNIFLAADNG |
| | ILDPTEAERLARRIEKKERS |
| 765 | SFEEVIRRAIKLAEKKGDELAVYLLRYILKAVRKG |
| | LASEEEAEKAARRIEKVLKS |
| 766 | DKEEKVKKLKDRANEVASKAKTRLAMLLKILVEEL |
| | EDALKKGDPDDYRLAYKKVEQAIKIIE |
| 767 | SEDSRLDQMKVKQAAKLAESGKVDPHAVKIIIKII |
| | LEAARERGDEDVIKVAERALEKVKKIESS |
| 768 | TIEEELKKLARKAWKKGDEDAHAVLVNAWRAYKLG |
| | DEKALKKLIKLAKELLDS |
| 769 | TKVQELIERLREHAERKGNAVAKVIADELEEALRR |
| | GDESDIRMNSRKAKQAIKA |
| 770 | DKRKKLEKIAERLAREGKLDEEEAEKLAREAWKAG |
| | DEELLAKIVNAWLHAKLS |
| 771 | SRVELLLEVLKRVARIDGNEKALRVVKKAIEAYKK |
| | GLADEKQIEKLARKAQRLLI |
| 772 | DYQKLEKQVKTLVTLIKQLKKDEEFEELAQILLEL |
| | AEIASKKKDEEELKLLVYALKWLVDEAKS |
| 773 | DDTRMARLKVTLALNIVKNASSKEEADSALHIAEI |
| | VAREVNEPTLQEKVTRTKKWVEKYES |
| 774 | PEVKKEAKKAEELLTQARKLAEDPRIRYIIEVLIE |
| | ELRKAVKNDNEEDLHIIIWRAKAIWKYVL |
| 775 | DKEEKVKKLKDRANEVASKAKTRAAIILKILVTEL |
| | EEALKKGDPDDYELARRKVELALKHIE |
| 776 | DPRKKLKELVDRAKTLAKQVGDRMALLVVKALEME |
| | AKEAIDNNDEEQLRMVEMKLRLAIKHLES |
| 777 | DPRKKLKELVDRAKTLAKQVGDRMALHVVKVLELE |
| | AKEAIDNNDEEELKLVERKLRLAIKILES |
| 778 | DQELAKIIATAVYEQAEKSGDPEDERLAILKLEMA |
| | IKHVTDPNIRKYLKKLLENLKRLQ |
| 779 | DEDEKLIRRKIELALKILSKIPDPTAQKVVETAKK |
| | LYEEATKKNDKELLEDVAAYAVIQAIRI |
| 780 | DVEKLVKEVQKLAKKRGDEKAEEAAKIILHAYRAG |
| | VTSSKTASIALKILAKRLKG |
| 781 | EDREMLKRKVEIARRQGKLSDAILEALYAQARDLG |
| | DEEVRRLIETFRREKE |
| 782 | DETAELILKLASIALTVLAEVNDKVTVDITENGYT |
| | VRVDLDRDPKKAQEAIRRALEYLEKANKK |
| 783 | PDEAVRLIADIVLEMLEEAQDPTDRILLTKKVEQA |
| | LKHAKSIPDPKAQKIVKDLKERLDKIG |

TABLE 7
InsulinR binding polypeptides

| SEQ | |
|---|---|
| ID | |
| NO | Sequence |
| 784 | LIREEVQRRLEEIKQKIKEGKLDPFEAMSLLAELY |
| | ELVEKLGDPELRKELEKVMEIVMRLG |
| 785 | SKEELKERAIRLLKEGDPFEAAMLLMHLAFLTGDP |
| | RLEEVIRLLEEAFELGDPELLKEIIKLLEE |
| 786 | DVMEEAFTVWFQLENLAFRVDDPEQRKTVDTLSKL |
| | LQEAADRGDRELLKKVIKTARDVISKVNS |
| 787 | SELLERIERLLKEGNPEEAREVARELLERTGDPRV |
| | EALVSLIEELLRTGDPFYELFVEMILRELR |
| 788 | DEELLELVYEAVEKNDPRLLFEAWMILASLLDKTG |
| | DPKIEELLRLLQLVDRGDPDARRRIKELFK |
| 789 | DEELMELVYEAVEKNDPELLFEAWMELASLLDETG |
| | DPKIEEALGLLQQVDGGNPDAGRRIKELEK |
| 790 | DPFTAMELVARVFELALEKNDEELQKEAETLMEIV |
| | IKAAQNNDEEKVKEVIKRAKELLSKS |
| 791 | DPFTAMELVARVFELALEKNDEELQKEAETLMEIV |
| | IKAAQNNDEEAVKEVIKRAKELLSKS |
| 792 | DPFTAMELVARVFELAVEKNDEELAKEAETLMEIV |
| | MKAAENNDEEAVKEVIKRAKELLSKS |
| 793 | DPFTAMELVARVFELAVEKNDEELAKEAETLMEIV |
| | TKAAQNNDEEAVKEVIKRAKELLSKS |
| 794 | DDHAQAQLVKKLLKLWQDQGDDFYALLAVEAAANE |
| | RVKKYLKKYYPEVYTLLEQVKRTLEKKRS |
| 795 | PEVKKEAFKAFMLLMDALFLAEDPNIRKTIEELIE |
| | RLEKADENDDEEKLKEIIKKAKTIWKQVL |
| 796 | SEEVEEAVELFKEDPKTALNLLFELFMRLVKEGDP |
| | EKAKLVQEVAELLMNGDPDKAREVARRVRK |
| 797 | DEEVDRAKELAEELGDPELAELIEELKELSKRGDP |
| | RAVEVVLRAMELANRLGDPEIQEVLIKLAE |
| 798 | DEESETIKKKLDDILRVVQSVNDPELESVVERAVK |
| | DAKKALDNGDKNTARFLLKMADLARQFAS |
| 799 | DKSERDIVEKIFKLVMEIMQYNPELAKKVHSIVEK |
| | AEHNQDPKLLKKALDVAEKALKTVSS |
| 800 | DEVFKAAMKVLHLAFKKGDEEAMKEVQKVSELLEN |
| | GQASKEQAKKILESLARRLKS |
| 801 | DDSQVKDVESKAREKKKKHPQVSFLAFFVIEVARF |
| | AKEFNDPLALKVAEELLKEVEKRAK |
| 802 | TEEEFRVMMLLMTLSPELNELVEELSEAMDRNDPE |
| | LEKRVLKRLLELARELGDEEVVRILEKLLK |
| 803 | SMEDTVREALKAAKKTGDEFYVSMAEMAAQLIGDE |
| | ELKQRVKEAERYVREY |
| 804 | DESEEVKKMLEDLLQKVEKATDPTDRQFAIFMIEL |
| | VLEAIPDPNQQKLAKTVLELARKLD |
| 805 | DLEEIVREYVERTKDPIAREALELLEEIKKEDPET |
| | AKVLAEAVVDAIERNDPESLKFVLLLIKIV |
| 806 | SELLEEALELVRRGDPRVFEVLFEIWMLAVQKGDP |
| | ELEELIRKVDELLQEGNPEEASKLLEKLLK |
| 807 | DPFTAMELVARVFELAMEKNDEELQKEAETLMEIV |
| | LEAAKNNDEEKVKEVIKRAKELLSKS |
| 808 | DEDAKMSIKLVLEIARDLGDEDVYKKVKSLLETAE |
| | KQSRNASSEEEKSRIWQDAARKVMKLFF |
| 809 | DPFTAMELVARVFELALEKNDEELQKEAETLMEIV |
| | IKAAENNDEEAVKEVIKRAKELLSKS |
| 810 | SEVEELVELVVELIKKTDPELARDVKETLEELLKR |
| | DPKEVLLYLEFLAHFLGDPELLEKVRRLLK |
| 811 | DKEVLEEVLELVEEGNPFEAFFLLLELAFKLKDPE |
| | IDEVAQLIVEAFDHGDPDLIRELVRKLLEK |
| 812 | DDLDEIFTLSMLAMELAYKVGDPSLETEVQQVVDT |
| | ASELVDKDPRFREEAKKILKKLVEKAKKT |
| 813 | NEEEKKKAQELVKQIEKILKQIDDPFYKEMVRMLL |
| | HIAKEMQDPEIIKEAYEAAKELLELAKS |
| 814 | DPESDAKRIATELATLYKKLDPEESRKVADTAFTI |
| | AMRLLSSPDPNDQKKAQIIAEVEDKLAT |
| 815 | DVKKLAKTVKEILKEAQKRHPTPEVKHEAEFISWF |
| | LDAATSVPDEKYATSILTELEKAARSLS |
| 816 | SELFELVMEAMEIANRLGDEDLMRLLVELVEKALE |
| | SPEVRELLEKLARLIIEDPEKARELVKKLK |
| 817 | SFEELLRELVRRAGISPDDIDFVLWFVKVALENGN |
| | PEIAKELVEELLRKAGVPEEEIEKVKRIVE |
| 818 | DPSEEAQKLVDKVKEDVKKKNDEDAEEQVKVABEL |
| | LKEAKNAQDPRDREFLVLLIKLIVKNLS |
| 819 | HLEELNRHLLHLAFEAYFKIDDEHEAERFHKISEE |
| | LQRLFENARSEEEKEKIVRLQEELIRRVI |
| 820 | DEFEKHMAQLAVEAIEEILKDIDDPHYKDLVRKLL |
| | ETAKKEQDPTKISKALEKAIKLAEKAKS |
| 821 | RQEKLRRLLEKVRKLVEKGKLDPFQIMSLAAEVIQ |
| | YAEKVGDETVRELAERLIEEVVKLAQ |
| 822 | DETKKVIDKLVSEAKKLADSIDDEFKRKLAQMAVE |
| | SLEFEVNNAKNPEQVKKLWKEIHKIITDL |
| 823 | SEKEREVKELLEEISRRDPRISFYLFFVLIALEAG |
| | NPELAEELIEDLIRRFGDPLLRELLELIRK |
| 824 | DELEFLVWFAQVALEMVQEDPTNEEAKKVATDIVR |
| | DLDELEKKSRDPRAQELARRIKELYKKAC |
| 825 | SAFKLALKAMHIANELGDEKAMKTVQDIVRLFDEG |
| | RISEEEAEKALKRLIKKLK |
| 826 | SEESEKVKRWVETELTKANKQNDVEKAMSIVATAL |
| | ELAEELNDEELEKWVRSLAEEVETKAV |
| 827 | SLLERIEEALRRNDPELVAMLIMNLAFMTGDPRVD |
| | EVERREVKAFEEGDPEKAKELVKELLKRVK |
| 828 | MEASESAKELIKIVKSLYSNGDHNAKFYASMLKML |
| | AEALELNAETEEIKKVVKEAKSVADSVLS |
| 829 | DEDKKTLDSLVSYVETVIQQANDPFLSFMLEVLLR |
| | FAQENNDPEAAKEAYKLAQDVKKNVD |
| 830 | DTEEIRNELFKIAMIALRVNNEELYEVAQKAAELL |
| | KEVSKDPRKREELKKLLKRARELSKRS |
| 831 | TELEFLEEMVRLVLENALENGLLSPDDVKKYEEKV |
| | KELRKRGDKDEVQKILEELLERLERW |
| 832 | GEFYIELVEMALDFVRMLSGDEEFIKRVRKRLKEV |
| | KERGDDSKLQEILEEVSEYIERVA |
| 833 | DPFTAMELVARVEELALKKNDEELQKEAETLMEIV |
| | MKAAQNNDEEKVKEVIKRAKELLSKS |
| 834 | SDDEFWRWMVKAAVDAAKELNPDPTVQTKADEILK |
| | KLEEALKKKDPTLVTRVLEEATRLAEEA |
| 835 | DEKEELEKRLREAEKLVRQIQNEFYKMLADMLTKT |
| | FKEALDNNDTDQLRMIVEVIEELARDALS |
| 836 | SDFLIHFAKEALEEARESGLLTPDEAEKWKKLLEE |
| | VRKRGDDNQIRKIYEEIIELVERING |
| 837 | DDEEVKTWEKLAKEAINRIPDKDVRTEVEKMVRDL |
| | IKAAHSPDPQEVRFALEMVRMIIETERG |
| 838 | NEESEKLSRHLLELVERLVDDEDVVKTARELAREA |
| | IELSNSSDHRDRERAEFLNLLLKLLT |
| 839 | SEEDKIRKKVEEYVKKAIKRGINPSEVADWVAKYL |
| | TKAVREGKLSPEAARKIVNLAFELALKLI |
| 840 | SEVEEIIEELRRLGNPEVAEILELALRVAKELNDP |
| | QTEDSITELARLLKEGDPFAKHMLELIARD |
| 841 | DDSEEITKLLDDLVTKAKKKIKDPRDQKIAEDLAK |
| | EAKKLASSPDPFDKHMAKLLVEALQQFV |
| 842 | DPSEEAQKLVDKVKEDVKKKNDEDAEEVVKIAEEL |
| | LKDAKNAQDPRNRSFLVLMIKMIVKNLS |
| 843 | PEEREKLEELIKKDPSEAVFLALSILARLFEETGD |
| | PRIEELFKLLFEALERGDKDLLERLLKRIG |
| 844 | KEEAKLNADFLVWMATVAARDSSPESRTIAKELIK |
| | EAKKLAKEANDPNVEKKVRSVEELIKKLG |
| 845 | SAFELALKAMEIANRLGDEKAEKTVKDIARLVSEG |
| | RISEEEAEKALKRLIKKLK |
| 846 | NEEEKHNAEFLLWFAKVMADYISDDDKRKKAQSLV |
| | EKARKLDIPEEAKKVYKIVSTILERDAK |
| 847 | DLIEKVLEALERGDPELLARLLFELVMKLLSLGDP |
| | RLLELAQKLANAFDDNDEELLRKLLELLEP |
| 848 | SPKEELDKWSKIVKEIARKKNDEELYRIAERIYKD |
| | AKEALEKNDETDVKFLIEMLKMLSENG |
| 849 | PAAETLEEAVEEGNERHVEFYLFFVLQILEHDPDS |
| | PEAKELRRVLEELRRKDPRVEELLKEAKRR |
| 850 | DAEEILRELAKQVGVPPEEVEEALEILTRVLGDPK |
| | EAAFELLAILAEAAEKKDPRLFRELVERVR |
| 851 | DEEEVRRVLEYAWFYLVALDTEEARKLAKTLDDLW |
| | KLAQSIPDPKQKKEVLDKLKEFAERVVS |
| 852 | DPSEEAQKLVDKVKEDVKKKNDEDAEEFVKVAEEL |
| | LKQAKNAQDPHERRFLVEMIKMIVDNLS |
| 853 | DEEEIKRILEEEKRALEEAGLDEEAVRELLEESKR |
| | EWDEVERRNREEEWEKLKEVQRFRLAIIK |
| 854 | DPELEEAFKLTMLLMHLSMQVPDPEQQKTVETLAK |
| | LLTEAADKNDKDTLRKVKKKAKDVYSKLS |
| 855 | SEAEKVVKELLEDAKKLVENKQASPEDIEFIEFEV |
| | NIAAEANGDEELLKKVKKVIKELKDKS |
| 856 | SVEELIKELRELGDPELLRLAEEVLKLARKLNDPF |
| | LEKSIEELIRRAKKGDPFAKEMLEMLVHEG |
| 857 | DKEIEDKAKEVSKRAKELVKKDPFEAMSLVAKLFE |
| | EAFRENDEELLRWAEKVWEEVRKYIE |
| 858 | DESLSKLVFTLLSLLAEAWKYDPDSAETAVELLIK |
| | AANNNDEEQLKKAVDYAKKVVDRATS |
| 859 | SLEEEARKLAEKLKRQGDEMAKELAKYLEDAVKNG |
| | DKNDVSFAIWMVRVFQE |
| 860 | SVREAVEIILKRVGVPPEFIRELKEELEEAEKEDP |
| | REAEELAEFIIAFALNVPPEEARRLLEELQ |
| 861 | DEEAVKELEKLAKELGDPELLEALKKLRERLEQGD |
| | PEANDLLERLWEAVVNNDPDLVKELVKRVP |
| 862 | SVEELLELLERLLKETGDPDVSFILWFVRVALESG |
| | NPRIATEIVLQAAEQLGDEELKKLAEELLR |
| 863 | DEHEKEFLKALAKMALDLLRNASDPNLAKELVSTV |
| | KDLADLVNDEDAKELKKQADEVSSKAS |
| 864 | TEKERWKDKIFQLIMELLQLGLDPEEILKVAEKAL |
| | ELEKKGVSPSEIKKWVEKVVKEVKKRI |
| 865 | TDELKKEIEEVEKKVNTSLSKNPFLLWFARMAIEQ |
| | AKEAVKKGDEEEAKSALTTVKELQKLVNS |
| 866 | SEEIERLVRRAAKGDEEAERLIEEIIEELKKRDEF |
| | RAAMVKMILEALKEVPDSEELLEDLTRMLE |
| 867 | DLEELLRREREELGDPRDAIFVLLILLMEEGRLTP |
| | ELLELADEADELIKRGDPRLEEVLKLLVKP |
| 868 | SEMKEVVRALVEEAEQRIREGKISPHEVREYLEMA |
| | RMAVEALGDPEAKKLVERLERLWRKIM |
| 869 | SEELREIVKRALEGDPEAEKLLEEILKELEERGDP |
| | RAFLLWFLIVAIREGNPEVVEDVLEDLLKR |
| 870 | DPELEEAFKLTMLLMHLTMQVPDPEQQKTVETLAR |
| | LLSEAADHNDKDTLRKVKKKAKDVYSKLS |
| 871 | PKEVAEVARLLVEDPNNKEALSLLMKLWFEAVERG |
| | DPELERLVRLVNELLQKDPREVRKLVERLR |
| 872 | GEFYIMLVEMALQAVRENSGDEEFIKRVRKRLKEV |
| | KERGDDSKLEEILREVTEYVQRVV |
| 873 | SEEEVEELLERLKKISPDVQFYLWFLEVALRSGNP |
| | EVAIEIAEDLLRLLGDPLVREIIKLLRKIR |
| 874 | DDEEVKTWEKLAKEAINRIPDKDVRTEVEKMVRTL |
| | IKAAHSPDPQEVEFALEMVRMIIETERG |
| 875 | SEEEEIEELVRKDPIQAYFLLLELANKLGNEELVE |
| | EVAERVQELYENGNPEEATKLLVELLERLR |
| 876 | DPESDAKRIATELATLAKKLDPEESKKVEDTAFTI |
| | AMRLLRSEDPNDQKKAQIIVEVEDKLAI |
| 877 | DDIQKEAKKVIEQLQRIKKTYPDNEKILFLVELAI |
| | EAAQFAIKENDEEALKVAKELLEAVKKIC |
| 878 | SKEEVEKLVFKVMEVAVRVGDPTAESIAKTIVEQA |
| | NEAALNNDDEKLKKVSKRLKSFIKTE |
| 879 | PDELVEEVVKKEGISPFIRFFLRIVVEQLKRGEID |
| | PEDAEKTLRDLLETVGISPEEIEEILRRLK |
| 880 | DESLAKLVFTLMSLLAEAWKYDPDSANTAFELLMK |
| | AAKNNDEEQLKKAVDYAKKVVDRVLS |
| 881 | TVMDEAFKVTFEVMELADKVPDEKVSRLLKTLAKL |
| | LTEAADRNDEELLRKLIKKVKEVRKQAKS |
| 882 | SEMKEVVRELVEDAEQRIREGKISPEEVEFLLLMA |
| | RMVVEELGDPEAKKLVERLERLWRKIM |
| 883 | RKEEAEDTAFKLFMLWLTLTNPEERKKVEKQIETL |
| | VKKLSNAEDPQEQKVAKTVKETLDLLRS |
| 884 | SAFELALKAMEIANKKGDEKAEKTVQDIVRLVMEG |
| | KAPEEYAEKALKRLIKKLK |
| 885 | DELEAVREYAKFLAEIAGVPSVSVRVSNGRIQVTL |
| | KGTDEAARAVQKILTEAVKHWGVDVDVQVR |
| 886 | SDDDVKKLLDELEKLADQIPDEFVSLMVKMIVDAA |
| | RKALKLGDTEEAKMIAKVAEELVSKG |
| 887 | SVEELLELLERLLKETGDPNVEFILWFVRVALENG |
| | NPRVAIEVVLEAAEQLGDEELKKLAEELLR |
| 888 | DVDEAVKAVEEAVRMVQKHPDDEALRWFARVVIEF |
| | VKELASSIEDEDQSKTAQKRATELERKLE |
| 889 | DTFTYLIKLLSKGDPFARHMLENLLEDAKERGDEE |
| | LYRLIKEAIELVEEGNPEEAEKLAKRVDEK |
| 890 | DAREIFRVLALAAETIEKASEEEVRRELEKLIEEL |
| | FQAAHRNDEEALKKVLKRLKELIKEQK |
| 891 | DEFELAFTVMSLAFQADLAEDEKELRTLQSLIEEI |
| | LRKAQSEFLRKLAEDLLKEVANNS |
| 892 | DEEETIRSVLKELKDDASNASSDEDREFLIWMVNV |
| | FAETVPDPTARKIAKEINETLSKLS |
| 893 | DALERAKELAERLGDPLVEVLLYFLEQALRQTGDP |
| | KYEKLAELILELLERGVPPEEVLHLVEELG |
| 894 | DIFELMFLIMHLLKDNPELSELFREVLERLWRGEI |
| | SPEEALRLLKELAREAGNPEVEELLKRVEK |
| 895 | DEEEVIEKVVRLYEEGNTFEVMALLAKLFEETGDP |
| | RYQELLDLVFEVIKKGLSPEELEKLLRKVP |
| 896 | SEEEELLKELKKRVSPEAREYVERLLELLERGDPN |
| | FLFVLLELLFLADELGDEELKRIVEKLLKK |
| 897 | SEAKEVVRALVEEAEQRIREGKISPEEVEFLLDMA |
| | RMAVENLGDPEAKKLVERLERLWRKIM |
| 898 | DEEEVEKLFFKLEEFAYRQGSEEAKKALKKEHELI |
| | EKAQHVPDPTERKKLLDSASKVAKSVIS |
| 899 | SLELLEELVELAKKGDPRVFELALEAMQLANERND |
| | PELSELVQRIVHLITNGNPEEAEKLVEKVK |
| 900 | DEVKEVAEKAVKTGDPKLIKEALELLTKLVLKTGD |
| | PELRRINTLLFEAVMVGDPELLKKILKEIR |
| 901 | DWRELTETLRRLVEKAKKSVEDPFVRALIEIALEA |
| | AEEASKRKDEELLHLLAEVVEELRHAS |
| 902 | SVFELSMKVMHLVAEVERNAEDPEVQKILKEVNEL |
| | VREAAEKNNEELLKRAEKLVKKAKELVS |
| 903 | DDEEAKKLLDLARKALKEVNKTASPEEQKQLTDAV |
| | REAEKLLHSPDPFQREMARMLLEMVVMLG |
| 904 | DDENVKKDVKTVKDIAKKLNDERILKTLQDAERKA |
| | KENNDSRIVRDVAFKLWFQLMNVE |
| 905 | DADSFYSWLLEEALEQAKELQDPEVARMAYESAKD |
| | ALEKYPDSELVRKVLKKAEELQRKLTS |
| 906 | DESLFEALLELMQVSPEAQILVEIISDLFVRGVPL |
| | EEIEKIIEEEAKKLGIPEEVLRLAKELLRK |
| 907 | SELSEEALRLLEEGNPREALKVLFELWFELVDRGD |
| | KELSELVQEIAELLIRGDPDEARKLIKELT |
| 908 | DEVEKLTTEAERVATKLERSPDPDNQFVAFMIKMA |
| | IEFALTISDKDAAKEALKSAVEMARTY |
| 909 | DEEELKELAEKLKEDPQVAVYIWALLAHLWYKTGD |
| | PEVEKVERRFEELVHRGDLETASELVKRIG |
| 910 | SLDEVEEELKKLVNDPEAERNIEFVVWMAKVANLS |
| | PEELLKLLEDSARASGDEELLRAVKELLRK |
| 911 | DDKTLTEVWQHASTLAKQKNDEFVLHFIEVMYTTA |
| | QELGDPDEKRNVEKVLRDLSKDLEG |
| 912 | SEELREELKRAVDRNDVFLVVMLLLDESLETGDPR |
| | YEELARRIVEVDMRGDPETERELLKLAKEP |
| 913 | EEDELRKLVEELEEKARKVITSDEEREIVERIIDD |
| | AKKALKNGDKTTVKFLAKMVEMFIRTG |
| 914 | DEEVKEILREALNLDPEEINDLIFREWFLAVQLGD |
| | PELERVLDEIAELLQKDPEKARKLIKELLK |
| 915 | PEELVKEVEFLILMLKVIATDPEIRKDIERLEKEI |
| | RTRIKKDPRFAEEAVRRLRKILKRLVEEI |
| 916 | DEYQEKANKLYKEAEKLVKTYRSNELVKELFEIAT |
| | RLLKEAREKQDPMLFAFVSMAIDALKENG |
| 917 | DETKIAKELVDSARDLRKQNTEFAKHMVKLLSEEA |
| | KQLKSNIDDPTERKVVSEAIEEIDKLSKG |
| 918 | DKEIAELLKLLLEDPNDKEVADRLERLLMELMHRG |
| | DPLLELVLEAAQLIEEGDPRVREVIKKVEK |
| 919 | PEEEEDVKRIIEDLLKLIQNASSEHEANFLYHMVE |
| | LVVEAVNSEYAKKAHELAKKVLKELRKR |
| 920 | DEEHYRMNIDFLIWMAQTAVSLDPDVLKKITKKAE |
| | KIKKEVPDPDQVVKLLEKLVQEAVELAN |
| 921 | DDEEVKTWEKLAKEAINRIPDKDVRTEVEKSVREL |
| | IKRAHSPDPREVEFALSFVRMIIENERG |
| 922 | DESKKIADEVKKTAEKLIKNGNVFEAMSLLATVLE |
| | KALKNNDEKLYKLVMTVAKEVESLAKS |
| 923 | DEEFATWFVRIALENGDVELAKELAEDALKQGEIS |
| | PDAADRLRKEIESVEKR |
| 924 | DSEEVKDLSKRLQEAAEKAQDPNMLDKAFKVWFQL |
| | VEAYNNNDEDKVKDASKKAKEVIKTIDS |
| 925 | DEREELAQEVAEEMIREAKHAESERHAEFYLFFAE |
| | RLARAINSEETLELIKEVAREIREKG |
| 926 | SSEDVVRELLKAAKKTGDEFYVLLAEMAARWIGDE |
| | ELKQRVKEAERYVREY |
| 927 | SEEEVREEVERTGDPDVKLALELIEELKRRGDPES |
| | AKIVTEMVLKLIRTGDPFLRALLRMMIENG |
| 928 | DEMKKVSEELKKDIKEALDKNDSHNLRFLIMIAKM |
| | VASTINDEDEKKEAEKAEKILRDRES |
| 929 | DHEEEIRSVLKDLKDRASNASSDEEREFLIWFVNV |
| | FAETVPDPTARKIAKEINETLSKLS |
| 930 | RSEEDLRFRLHMIELLLRAIGVSEDEIKKINKTLE |
| | ELIRKGDSETFKRIEDEVEKRVKKET |
| 931 | DDKTLTEVWQHASTLAKQKNDEFVLWMIEVAYEAA |
| | QIYGDPHVKKEVEKSLRDLSKKLEG |
| 932 | SDEDVRSLLERIDSELKNVSNEFVKFFVELAVREA |
| | KEALKQGDKEYAEMVLKAAQEVLSVE |
| 933 | DEEVVELLKKLVNDPELEKVLEILLKLIKEGDPDA |
| | QFLLFMLKLALEVGDPDTVRSILEDILRQT |
| 934 | DEAFEAAHILAESLFIAREIGDEELIRLAEHLLEL |
| | LSKAAEENDKDLVREILRLARESLKRSR |
| 935 | SEELREELKRAVDRNDVFLVVMLLMTLSFETGDPR |
| | YDELAQRILHVASEGDPETLRELLKLAKEP |
| 936 | SEELEEVLELLKRDPKKALELLFELWFEALRRGDP |
| | ELLRVLEELNHLILEGDLEEAKELLKELLK |
| 937 | SETEFVKFFVDVALESAKELQDPHVAEIAVRIAED |
| | VLKEDPTDETVRELQKKAETVRDQLKS |
| 938 | TVEELARKLLEEGRLSPEEIVEVLLRELRKLGIPP |
| | FEAALLLLKVANDLNDPELYKAVQELAERT |
| 939 | PQLDKMVKDAQDLADKIVKKASNPEIQKKAKTVKK |
| | LLEEARQKKDEQTVAELAFKAMELWEMVT |
| 940 | SADEATDSAAKAAEKGDSEYIERLLKKAKSDNIID |
| | EFHIWFIKMLLEFARE |
| 941 | SEETITRLYKDAKKKAEDKKNEELKKTVKIAKDLL |
| | DTAKNVDDRMTKEFLETMAELALRDV |
| 942 | DPELEEAFKLTFLLLHLLMQVPDPEQQKTVETLAK |
| | LLTEAADKNDKDTLRKVKKKAKDVYSKLS |
| 943 | DPQKELHKVYETAVKRIRSIPDKEKQKEVVKEATE |
| | LLRRIAKDEQEKLSAEELSWMLKVLS |
| 944 | DPEQELRTLEKIVTEAAKDPRRSEDFFKAASRLAE |
| | LIYKANDPKIQTIAREVLTKAFSIAN |
| 945 | TVEELEKLVEKLTEKVKRKDPRLSEKAQRILDQAK |
| | DLLSKAENPLLQEMIARFAVSQLQRLV |
| 946 | SMEDIVRELLKAAKKTGDEFYVMMAEMVAREIGDE |
| | ELKQRVKEAERYVREY |
| 947 | DKSDAQRILFEAWFLVVELGDEELEKEVDRLQKEF |
| | LEADKKNDKDLLDEITRQAEELLKRIKS |
| 948 | DLEKLKKDAKKALEILKKLNNEFLVWFLENLVKAL |
| | EMAIRKNDEHVVKEVSKAIQEIIERLQK |
| 949 | DEEELKKVAETAKTVAKQKNNEEVLKAIKEMATEA |
| | EKLIKSSNPRDQMNAEFIIWMLRVLIED |
| 950 | NEQEKRNASFLLEMAKMLADFISNDDLRKKAQSLV |
| | EKARKIDDPNVAKKVYKIVSTIFERVVK |
| 951 | FEDAEFILWFAKALVESVGDEDALEKLKEFEKKVT |
| | EAIKNNDEEKVRKLLSKAEELAERVLQ |
| 952 | DEHLKKLEKKVRTLLEKARKNNDEEVMFLLFFAEL |
| | SIEMVKMNPEAKEDAQKTVEDLLKQAEST |
| 953 | DEESSRAAKDLLKKAKEAVERNDSQTVSFLLWMVK |
| | AVAQNAGDEEVEKSVSELEKLWKKIS |
| 954 | DEVEKLLREANELAFKLLSDDWRAFDLLQTLARIA |
| | DEANLSGDKETASKLLKTIIELLKRG |
| 955 | DPSEEAQKLVDKVKEDVKKKNDEDAEEAVKIAEEL |
| | LKAAKNAQDPRDREFLVLIIKMMVENLS |
| 956 | SEEEYKKKIKELLRRGDAFEAALLAMEAFFRLGDP |
| | RFEEILRIIHELFERGISPEEIVEILERLE |
| 957 | DWRELTETLRRLVEKAKKSVEDPFVRWMIEALLDA |
| | AEFASKNKDEEMLKLIAEAVEDLRHLS |
| 958 | TEELIKLVKELAKRNPEEAKKVVEELVKLLGLDPL |
| | AERMLKELVEEYYRTGDPFYLFMFEVLVRN |
| 959 | DELEKVVKELSTDADKAVKNGDKDKVKFLVWFLKS |
| | VVEFDPDNPAAKLAKKVIEKLEKLIKS |
| 960 | SEEIKRIVELVKKGDPEALKRLRELLEELKKKGDP |
| | RAFLLWFVIVALEAGNPDIAKEVAEQIERR |
| 961 | DPSEEAQKLVDKVKEDVKKKNDEDAEEEVKIAEEL |
| | LKQAKNAQDPTEREFLVEMIKMLVKQLS |
| 962 | QEEYKRLLEELLRKAQKAVKNNDQHEVSFLAWFIT |
| | ISAENVEDEDVSKHFLELAKELHKFVNS |
| 963 | DRDEQLKKAIKDLLEQLKKASSRHEASFLIWFIRL |
| | LREDAQTPEVRTLATEADKIYKKET |
| 964 | DEWQELSKIVKSLIDELKKSPDPKDQFAAAMAEMA |
| | WEMAERAQDPNVRREALKTAIEMVRDT |
| 965 | DPFTAMSLVARVFKLALEKNDEELQKEAETLMEIV |
| | IKAAQNNDEEAVKEVIKRAKELLSKS |
| 966 | DDTKKLHDTVTKYAQEVLKRARDEDVKKVIEELLR |
| | DAQEVIKNHDEETAKFLYLMIQLASKQAI |
| 967 | TEDYEKVKRELEKVEEEAKRKNNLEALFLVFMAKL |
| | SLEAFNLDPDNKDQIISVAKDLLKLAKNS |
| 677 | SAEEALDSAVKAAEKGDSEYIERLLKKAKSDNIID |
| | EFHIHMIKLLLEEARR |
| 968 | SVFELALKAMEAANRKGDEDAMRKIIKIVQLASDG |
| | KIDESQASTRLRRILKKLRS |
| 969 | SALEEAERLARELGDEDLLFLLAMVKMARSTNPEV |
| | AKELLEEAVKLAEELGDPDLLKLLRLALKE |
| 970 | TEEERVKEALERNDPDLVKNIIFEAVMELLKRDTE |
| | KAQRVAELAVELLKEGDPDKLRELARRADK |
| 971 | DDETKELQNEAFKAVMIVMQLNDPRLEKVVRDVQT |
| | RFEEAQKHNDEETSKKVLKKLVEIVRKT |
| 972 | SEEKEVVRHLVEDAEQRIREGKISPEEVEFLLMLA |
| | RMVVENLGDPEAKKLVERLERLWRKIM |
| 973 | DEEEKKEKTLDKLLSEAKKKSSQNPEVQFLAWMLE |
| | MLVEQFKLVPDPEIRKEIYKAASDLYKQT |
| 974 | AELAFKAMSLAAQLAKALLDGDEDKVKTARSLLDK |
| | VEKEVKKQNDEEVLKFVQSLKKTAEDVT |
| 975 | NEDEKRNAEFLLWFAKVLADSISDDDGRKKAQSLV |
| | EKARKLDIPEVAKKVYKIVKTIFERDVK |
| 976 | DVFTVALKVIEILNRLINNAEDERIKKLLETVSRL |
| | VVEAAERNDEKLVRDLYKTLEKLVRELRS |
| 977 | DESEKFQTVVKELEDLVHSVEDPTRRKKARNIAFK |
| | LVMKLMN.AEDPKEFKETVDKAKEIVKKAA |
| 978 | PLEEQLRELLEKAFEAWAKIRDPEEAETFVEKFQT |
| | LEKQFRNASSEEEKKKVVEKIKKLIDSVL |
| 979 | SEIEEVLEKLKRLSPEISFFVWFIEVALRNGNPEV |
| | ALKLARDVLERFGDPLVKELLELIEKLVRK |
| 980 | DDKERLRKLVDDLIRKAKEVKDPETVRNLLFQAIM |
| | AAMLINDPELEKKVKEVFKEIKKKVS |
| 981 | DEEEKLQTVIKELEDLVKSVEDPTRRKKAHEIAFK |
| | LVMKLLQAEDPKEFKETVDKAKEIVKKAA |
| 982 | DIDEKLDSLVKKAKRYVDETNSDELKEEVSIAEEL |
| | VRRAKNASDPNDKREUTWMVEAIYELVI |
| 983 | DPKKLDELRKKIETLLRKVTDPFAKEAVKAALELA |
| | EEALKKQDPFLEFFARMAYEFAKEMQ |
| 984 | SEESEKVKRWVETELTKANKQNDYRKAINIVETAA |
| | MLAMQLNDEELEKWVKSLAKEVMSKKR |
| 985 | DPKEELERVTKTAQKTVTELNDEFALEMVNNLVEF |
| | AEEAVRNNDEELAKTVIRALQETFKNMM |
| 986 | GEFYIMMVELALQTVRELSGDEEFIKRVRKRLKEV |
| | KERGDDSKLEEISREVVEYIERVL |
| 987 | DLEKEAKTVVTLLKRLKKQVTNPDVKKLVDEVAKS |
| | VETAVKKKDEDKIKSLVFEAQILIFAI |
| 988 | DLHKEAFKVWFEAVELIFKVQDPHIRKLLEHLAKI |
| | LQEAANKNDEELIKKILKLVQKVIKEARS |
| 989 | SIEDIAHKIISLALELGDEDALSQAAEVLEKWLSG |
| | KISPEQAKKLADRIRKILE |
| 990 | DPFTAMELVARVMELAIEKNDEELQKEARTIMEIV |
| | LKAARNNDEEAVKEVIKRAKELLSKS |
| 991 | TEEEKKAKKWVEKLVEKAGLDDFYKEMAKLVFEDA |
| | VLQGVSTKEARKIVKKVIKEARNV |
| 992 | DKREEVHTLLEILAEAAEKRDEETIRKVASRAQKL |
| | AKEIGDEFLLSFIQMLFEYAQQLLS |
| 993 | GELAKRALELIERGDLDEVEKLWFEIVERANRTKD |
| | PELEELLRLIHLAAQGDPEAKKELEKIIRK |
| 994 | SELLEEAFEIWFKVVEIAYKLNDPDKQRLAEEVTR |
| | LIETAMNVPDPTQVKKLVTKAKEIFKKVK |
| 995 | DEEELLREVVERFKDDPFHVAFLLLEIAERRNDPE |
| | LAELISEVIEEVSQKGLPPEELLRLVLELK |
| 996 | DFEELLEEARREGDPRTLVFLIALLALQRGDPELV |
| | REIEEVEELIHRGELPPEELRRLAEELIKK |
| 997 | SVELLFEVWFLIAQLGNEEVLRLLEIFAEAAIRGD |
| | PDLLEKVERRIEELSKTDPAARLVLEAIRG |
| 998 | DEFLIMLAKMLLEFARNNGLLTPDEAEKWKKLLEE |
| | VRKRGDDNQIRKIYEEIVELVERLAG |
| 999 | SEETITRLYKDAKKKAEDKKDEELKKAVKDAKDLL |
| | DTAKNVDDEMEKKFLEWFAEVLLRAV |
| 1000 | DIDEKLDSLVKKAKRYVDETNSDELKEEVSVAEDL |
| | VRRAKNASDPNDKRELTEMVELIYELVI |
| 1001 | DLEEKAKEAYEEGDLELLVFLVLMILMEKGDPRLE |
| | ELLKLAEEVKKTNDPELRKELRRLAYELIP |
| 1002 | SADEASDSAAKAAEKGDSEYIERLLKKAKSDNIID |
| | EFHIWFIKMLLEFARE |
| 1003 | SDSDEISSAVETLLKQAKDAPDPTDAEMLLWFAKV |
| | LVDYLNNDELRKKVEKASKEVEKINRS |
| 1004 | DESKKIADEVKKTAEKLIKNGLVFEAMSLLATVLE |
| | KALKNNDEKLYKLVMTVAKEVESLAKS |
| 1005 | NEKEKMDAQFLLWFAKVMADNISDDDKRKKAQSLV |
| | EKARKLDIPEEAKKVYKIVATILERDQK |
| 1006 | DPESDAKRIATELATLAKKLDPEESRKVEDTAFTI |
| | AMRLLSSSDPNDQKKAQIIAEVENKLAT |
| 1007 | SSELRDRLKKTFQELLKRGVSPWQAFEIIEKLLEE |
| | LFRKGKLDVDVAFEVMHILAELMRKWE |
| 1008 | DRTEKDQTVIKELMDLVKSVEDPTKRKKANDIAFK |
| | LVMKLLKAEDPKEWKEIVDKAKEIVKKAG |
| 1009 | NEEVKKEIKSLEKTVSTLASKDPFALFMAQVLIEF |
| | AKEGLKKGDEEDVKEANSIVRDIIKRLQS |
| 1010 | DPKKLDELRKKIETLLRKVTDPDAKEIVKDALELA |
| | EEALKKQDPFYEWAARVLYELAKQLQ |
| 1011 | DDEEVKTWEKLAKEAINRIPDKDVRTEVEKMVRTL |
| | IKRAHSPDPNEVEFALLMVALIIETERG |
| 1012 | NEEEKKKAKKLLDEAKKLADQISNDDLRKDAQSNV |
| | ERARKIDDPRDAKFVYFFVKLIYEFVQS |
| 1013 | DETQKRQVEKYVRTIEKLLKDAKDPKEITELLEKA |
| | LTYLERVNSELAMEAMYRLMEVYFEAT |
| 1014 | NEELLTKEVLEFAQSLAQRASSQEEVDKISKEAQK |
| | ILKELNVDPRLVEKVSRLVQEYYKKS |
| 1015 | NEEEKRHAEFLLEFAKMLADNISDDDGRKKAQSLV |
| | EKARKLDIPEVAKKVYKIVTTIWHRDQK |
| 1016 | PKEELEKLVRTLEELVKKKVRDPFVKWMADVTVTF |
| | AREAVKSGDKDLATMVIEDLKELLKTI |
| 1017 | DIMSLAFEAMELANKNGDEDAMKTIQKLFELFDEG |
| | KIDPTQVQRILRKIAKRLKG |
| 1018 | SEVEELLEKAKRTGDPRLASRAIFLVLMELLKRDP |
| | EEVQRVQEELLRLLKEGDLEELERLLRKVQ |
| 1019 | SEVLKELKRLLEEGDPEEALRLAERLLKEAKEKGD |
| | EELAFILWEVIVALRQGNPEAIRVARELVR |
| 1020 | DKEELKEELEKLIGDPDAAELLLHYIEAVRRGEDP |
| | PERVEALVEFIVKIAGLPPEVEKRLRELAR |
| 1021 | PHVENLVFTLVMKAMEAINKNDEDTLKKLKDTLDE |
| | LVKKDPRETEAAKLAKKLIKEQEELT |
| 1022 | DPVEFLSWMAETAISLLEELGLLSKEELQKWKEIV |
| | RKLTERGDTENLEKVLDKITEIIEKLQKS |
| 1023 | KEEVNNQAFKLVMEAMELANSSDPNNRTKAKELIK |
| | EAKKLAKEVNNPEVEDTVREVEESIKKVG |
| 1024 | DEFTEIVKELVKLAEEAVKKNDEDSVKFIEAMLKM |
| | MKEAATDPKQRELADRAIKKVQKLLKS |
| 1025 | DEHLKKLEKKVRILLEKARKNNDMKVAFLLFMAEL |
| | DIELVKLNPEAKEEAQKSVEELLKQAEST |
| 1026 | DPFTAMELVARVLQLAIEKNDEELQKEAHTLMEIV |
| | IKAAKNNDEEAVKEVIKRAKELLSKS |
| 1027 | DEVERVVELLKRLGDPVARELAELIEEILKRNEEM |
| | ARSAASSAEMALKKNDPESLKFLITLLKMV |
| 1028 | DIDEKLDSLVKKAKRYVDETNSDELKHAVSSAEEL |
| | VRRAKNASDPNDKRELTAMVEMLYDFVI |
| 1029 | DDSEEITKLLDDLVTKAKKKIKDPQLQLKAEVLAW |
| | FAKVAASSPDPEAKKVAKELVKELQKLV |
| 1030 | DPKKLDELRKKIETLLRKVTDPDAKEAVKMALELA |
| | EEALKKQDPEYEWEARVAYEWAKELQ |
| 1031 | SDEDEIFTLAMLAMEAIFKAAKTEEEFERLMKKLQ |
| | DVIEKAQQLDPSQQKKLLKEVLDEVKKL |
| 1032 | NEVFELALKALHVAFKVGDEDALKLIQKIAEKVSD |
| | GKLDEKQASKLLKSLIKKLE |
| 1033 | DVDTEALRAAEDMIELLKNAKDPTEAKFAKTMVEL |
| | LVELVKDPEARKIIQKKLKEAEEYVNKL |
| 1034 | GEFYIEMVEMALDMVRMLSGDEEFIKRVRKRLKEV |
| | KERGDDSKLEEILREVTEYVERVL |
| 1035 | DAFDALSILAEAAELVRKLGDEELKKEVDRLLEEF |
| | TEAARNNDKDLLDEITRQAEELLKRIKS |
| 1036 | DDDSYKKKVEDTLESLIKKAKDPLARKVIEELARD |
| | AKKAVDNGDKEKVEFLVLLAKLVADNAAS |
| 1037 | TDAKEIIKDLKKRFEEAVRRGVDPRQAEFLVKMVE |
| | MLAEDVGDEEVKEVVKELRKRLKELKT |
| 1038 | DELEKMVKRISTEADKAVKNGDKHEVEFLVFFLKL |
| | VVEDDPSNPAAKLAKKVIEKLEKLIKS |
| 1039 | SVSELLSEAASKNDPRLLEEAVELLVKELGLSPEE |
| | EERLRRLVREALKRGTLFEVVMELMTLANR |
| 1040 | DPREAEELAKKVEEVASKRGDEVMLRAVEEIKKLI |
| | ETAKKSPDEFYRSFVDMASDELKEITS |
| 1041 | DELEKVVKRLSTEADKAVKNGDKHEVEFLVWMLKA |
| | VVDFDPDNPAAKLAKKVIEKLEKLIKS |
| 1042 | SEEKEVVRALVEEAEQRIREGKISPHEVEFYLWFA |
| | AVAVELLGDPEAKKLVERLERLWRKIM |
| 1043 | SLEEELKRLISERLGVPPEFVEEIVEFDSEELKVP |
| | PEEALLELAKAVARLERDPELEELIRRLEK |
| 1044 | NNEAQFLLWMVQMLVEAAKLDPDSAEELSEAIKDL |
| | LKRIRKLGDEDASKKATELLKEAEKVIS |
| 1045 | DEEEEKLEELIRRGNTEEAKKIVEKIVKELGLDPF |
| | EEWELKLLVENAKVDPLVLEVLKRALKELR |
| 1046 | SKDEKLHDKLFKLWFLLVNLHTEEAKKLSKKVHTA |
| | AEKASTLSPEERRRLLEKVAKEAEKLIG |
| 1047 | DESLAKLVFILMSLLAEAFKYDPDSAETAMELLMK |
| | AARNNDEEQLKKAVDYAKKVVDRVLS |

TABLE 8
PDGFR binding polypeptides

| SEQ | |
|---|---|
| ID | |
| NO | Sequence |
| 1048 | DVQQEAKFVIARLAMLALHVDDPEQRKTVFKLMLLLADAV |
| | ERGDRELLKKVIKTARDVISKVNS |
| 1049 | SEIEEVLELIRRYDPEVVKELEKVERALKRSGVSPEKILK |
| | YLLIVAHFLGSPLAVRLLFRLMTKR |
| 1050 | SLEELERLIRKLVKEGDPAARRALLVLESLKRRGVSPEEI |
| | VRRLIAFLFILGNPELIRLAIRLFL |
| 1051 | DLLEKAKKVAREILDPEVVRIFELAVEVIKKKGANPSSIL |
| | IAVLRLLRRRGVDPELLREVERRAR |
| 1052 | DEREELIELIERNLDDPEKVHELLKRLLELAEELGDRRLY |
| | RYVMLIFWALRRNPERAERLLRKLK |
| 1053 | PELIEEALELLKEGDPKKVFRVLARLVQLLREKGDPRYRL |
| | VLLILAYVREGNPEAARQLLRIVLK |
| 1054 | DELREILREALEKGDPELVKELLELLARLADETGDPKLRI |
| | VIAYVWFAKKKNDPRLLKTALQVLK |
| 1055 | DDERLARLAFRVLIKRAGVPDEDVKVINGKVRVTITGRDQ |
| | ASQEALQLVFALARRLGLQVQIDTR |
| 1056 | DDERLATLAFRALIKRAGVKNLDVKVTNGKVRVTITGRDQ |
| | ASFKALQLVFALARRLGLQVQIDTR |
| 1057 | SELAEEILELIEKGDPRVRKLILELLKELKERGDEKRFKL |
| | LVRVWELLRSGNPELAKQLLKKIKK |
| 1058 | DKAREFLRAAAKYGDPSAKRALKLLEELRKRGIPPEEALK |
| | IVVEFLRKAGNPRLARVVEEALKDE |
| 1059 | SLIEEILKEVRKKNPRVVYILERLLRRLKEDGVPPEKILR |
| | ILIAAAKRLGDPEASELLRRALKRK |
| 1060 | SVEELVKRILELLKEDEHRALRRLVVLLLNRGISPEEIAR |
| | IALRVLKLFKRDPEKARELIEKVLR |
| 1061 | SELFREAIELLEEGNPEEARRVLERLAIRLAQEGDPRRRA |
| | VALAYFYLKTGNPKEAAQLLEEARR |
| 1062 | SLKRIVVILLLEAGVSPRDIARLFRIIDELKERGVSPEEI |
| | LKILIKILEELGDPRAAKLLRKLLK |
| 1063 | DETEEKAKRVSQYARNLGIEDVSISFHDNRLRIRVGGDDE |
| | KARRARRQIVRIAIQLGFRVLVITK |
| 1064 | DLRDEFFRLLLTAIEIAKNVPDPRKASKIRILVAHVYFKA |
| | RTLSKEQRVKLARELVDKAKKE |
| 1065 | DLSETVSKLASEVAKKVGVPSWEVRVHNGKVIVTLKGQDR |
| | AARRAMLLIRRIAEKLGVPVRVLVL |
| 1066 | DIVELLTTHAERVATKLERSPDPRNKKVAKFIKTLIKKAK |
| | SVPDKDKSLRILAMAFFFAKRE |
| 1067 | NEELEKRVEELIKRIPNPKERKVLRLLLKRLKEGDPKAAA |
| | LLEILLAVFERGDPERLILILKRVK |
| 1068 | DKQHRAVALIRLVARRLKVPDVSVDVRNGRVTVRFGGTDE |
| | RVRQAFLLARLIAKHVGVPIDVKVK |
| 1069 | GPLERTARELAKELGIPPEDIERVLEVLERILGDPRRALW |
| | ELASLLTRAKKDPYVRELLKALIRD |
| 1070 | SEQETASRLIKEAADRLGVSDVKVDVRNGTLRVTVRGNNE |
| | SAQQLATEVLQIATQLGVRVLVLER |
| 1071 | DKERIFARALRALARRAGVPSVRVEVSNGKVTVSVKGKDR |
| | IARLFAQLVYNLARREGIDVDVQLR |
| 1072 | DDWRRILARALLLAKELGVPRVVVVRIDGRWVVLVKGDNE |
| | SAKKLITILKKWEEKKGDEVRVQIS |
| 1073 | DVTEKLKKLITEAAKRAGVPSVEVTELRGKVLVRERGRDR |
| | SVLRAALLARRLADKENVPLRVIFH |
| 1074 | DKLATRAIRLALQAHLQARQRGTPVRIHLSFKGFTIDVTV |
| | TEDERSLERAIRLLILFERRSSEN |
| 1075 | DPTSFRLVMEISLVLQLFKKGEIDPSQAKTLLKRLQEKAK |
| | KIGDRFAVVLAEFAIRVIKKAEKS |
| 1076 | SLERIVRAAIEKAARRLGVPDVKVSVRNGTVHVKVRGSDR |
| | AALAAKIFAWNIARRLGVPVSVTIR |
| 1077 | SREKAFASYVRQVAKRAGVPSVDVKVSNGKVTVILDGDDE |
| | RARQAELLIRWESRHLGVPVTVKKK |
| 1078 | SDDQEKLERIVHAIVRHFGLSPEWEKRLKKVVRELLKKGV |
| | DPEQIVKIVVKIAIRVHNQK |
| 1079 | SEELVKKVEELVKKTGDPLLKLLLEILKRLLKINTPLARV |
| | LIDLILLLIDAGDREKLERAIRRLR |
| 1080 | DKELLEEAIKLLKEGDPEKARKVLLELAREAHERNDPKLY |
| | RAIALVYFYLRSNPRLAIQLLELLT |
| 1081 | DVERLVRAAVRKAAKKLGLPHWHVSVSNNTVRVQVRGRDK |
| | AALALLIFAWNIARAFGLKIELRHQ |
| 1082 | PRRIEDALRSLINSPNPELRLLAKVAIELLKRGVSPRRIA |
| | LIIRRLADRLGLSPRVLRLVLIAVE |
| 1083 | SKDEKARRLVLRILLEVGLKREVVLVRNGRILVVIRGSDE |
| | RAQTATKLVRTLAKKLGLEVRVLIV |
| 1084 | DRRRRFISRVLTIAKQLGVPRVIIIVNDGRVTVRVRGDTE |
| | KARTVQKFAQKVAEELGLDVDVQVR |
| 1085 | DKLAVRAIRLALQAFLRARLRGTPVRIHLSEKGFTIDVTV |
| | TEDPRSLQRAVRLLLLFLRRSKEN |
| 1086 | SFEEVIHRALMVAFVEGDKKAFRILTKILELARQGKMSEE |
| | QAEKRARRIEEKLRK |
| 1087 | DERKKVDAFLRFVIVRVFFVKDPETKKDILRKLQEFAEQI |
| | SDEEAKKKAQKVWELLTRLS |
| 1088 | SVEERIEELKKEGDPKKALILELALELLKRIPPARVYALL |
| | LALARRLGVPPRDVARLLFIALQAK |
| 1089 | DRALEIARSVLRIANEAGVPRLRVFVSKNTVRVRVEGDDD |
| | AAKRAKKLVEEYAKKLGLKVTVTKK |
| 1090 | DYRTLFLQIWMVATTLAKEAKSEEDVKKAEKKLQEWLDKL |
| | NVNKLLQATARRILRRVYKQLS |
| 1091 | DKDLKELYKELRKKLSPEEVVKIVFKVIEEKFGDPRRAFA |
| | ALYLVERSLGIDPEEVRRLIRWAFI |
| 1092 | SEEELIEKVERVVGDPALRQMURQMIEWLKKQGVDPKEAV |
| | VLAAFALARHLGDPELRKVAREVLK |
| 1093 | DPTRHRLLLRIFMVLVLFKKGKIDPSQAKTLLKRLQEKAK |
| | KIGDEDAVFAAKQAIDFIKRAEKS |
| 1094 | SLKELAREARRRGNPDVAFLVMLARYARKLGLPPKTIKKL |
| | LERQAKRRGIPPESLEEAKEIVEKG |
| 1095 | SERVAKIALLAALLGDPRYERSVKERVKELVKRDPRVEEL |
| | VRELIKRLREAGNPRAARILEEALR |
| 1096 | SLEEEIERALKRAGVPPQLIRIIKKLIRELEKRGVPPERI |
| | KRLVFTFLLQYDRRLALRVFFLLRK |
| 1097 | SEDETFKKLVKKIAKEANVPSVRVTKVRGNELVEIKGRDK |
| | AALRAALLIRRVAERLGLKVRIIMR |
| 1098 | DELREILEKALKTGDPRLLKLVLELLMRLALKGDPKARRL |
| | LAFLQVLRRRHDPEEVVKILLRLLK |
| 1099 | SVLEELLRLARELGDKRLADIIRALIRAVRNGKISPEKAL |
| | RLILAYAHFLGNKELFRVVLRLEKK |
| 1100 | DKLTKAAKELAKKVKSGKLSPKQAMRLLFVIAFRIGIDRK |
| | EMVRAAQHLMLLITK |
| 1101 | SEKEYLERVLRLLEQGNRRRAIARLLQILQELKRRGDPRV |
| | EEFRKLVRLLARDEEKAKELVRRLR |
| 1102 | TEEEKLKTKIKELAKKVGVPRVKVRVRDGRVLVLVIGDDE |
| | NAQTFSKLLLRIALREGIPLFVFIQ |
| 1103 | DNKVEMRAYEIVQDIQKKYPDPREAKKVAKEVLKRIVDSI |
| | DDPDERFVVHAAARLLLRKIG |
| 1104 | SLEEALEIIEKELGNPKLVQALRQLIRLLKRRGESPELIL |
| | AALRLFLRRINTPEARLAYKILRET |
| 1105 | SEESKRAKELIEAAARRLGLDPSAVEKARKLFDKLVKRGI |
| | SPDEAFHIAIRFLMKLSTSK |
| 1106 | DARLRLIFWARFAARSAGARRVRVTEHNGTVRVEVDGNNE |
| | RVQQLLKSVKRLAEKLGVPLEVTTR |
| 1107 | IEEAKLLKRMVKAAAKRLSQGRLDEEKWRLIVIMASSRLF |
| | SLGISREEIRDFQRQAKELKKKA |
| 1108 | DERTKKKAEELFKRLIKILQNAPNPFLRQLAKELETKERR |
| | AKKNNDDDTLIKLVEFAIMVVRAG |
| 1109 | DERVRRIFKVLRELARISRNLSEEESERFFKKILEEAARR |
| | NDRILYLAAKLALRDSRRALHE |
| 1110 | SELDKIVKKLTDIAREAYKANDKETIEKALRWAALFARQY |
| | RDPKFRELFRIIFQLRQRVER |
| 1111 | DERKKVARAVWEIAKRAGVKGFFVFVKEGKVWVTLRGTDE |
| | SAQTAKKLIEEWSRKNNLDVTVRVR |
| 1112 | DEKRRIFMRILLAARRVGVRRVLVFERNGREKVFIQGNDE |
| | RAKTASKLVTKLARKLGLDVKVTVV |
| 1113 | SVDELVEEAIRRGLPPEELEKLLEELLKKTGDPRVRYVIV |
| | ALRILLRLGAPPQIVLWVVLRIARR |
| 1114 | DERREELVKRLKKSPDPSEKAIAAAYEYFLKMGLDPEMVL |
| | YQLKRFARKVGDPKLEELVKRLEET |
| 1115 | SRLLRFALLVRRLAEDANVPHVRVVVSNGRVRVLVRGNDE |
| | SAQKFIKLFKTVATKLGIDVRVHVV |
| 1116 | THREILKLILKIAKKDEELAKRIYLIVWALRRGAIDPTQV |
| | ERLLEKLIREFGDPLVRLVLELVRK |
| 1117 | SLELVEEFLKKENTPEARILLRALEFLKRRGWPPRLVVQI |
| | LYTLARKLGNPELAEEIRRLAREAP |
| 1118 | GPEVLKKFEELRKRDPREALLFVLRIVFELGDPRLKRLAV |
| | RAWELLKDGNPLVEQVIRRLRELLH |
| 1119 | SEEEKITKTIETLARRAGLDDVKVNVKNGKVIVQIRGHDR |
| | AARRLAFLVIRWADEQGLKVLVQIT |
| 1120 | SEDEKIRKTVEQIAREAGVESVRVNRINGKLHVILKGDNR |
| | AARRVAALVIRYADEVGIRVDILLL |
| 1121 | SSRRRVISRALQLAQKAGVKRITITEKNDRLRVTINGNSP |
| | SIQKARRLIEKLAKEAGVEVEVRTR |
| 1122 | SEEEKVAKVIETIAKEAGVPSVRVVRVRGKIVVIIRGTDE |
| | KARRALRLIFQFANKQNLPIYIRLR |
| 1123 | DRSEVRKVETLAFRVARLLASEDPNNRKRAKKEASTIKKE |
| | LSKKSPSLSSLFEFEVRRITSRLG |
| 1124 | DPVEEKFKRLEKELRKSIKKGKISPEQALRILIKEMMHLF |
| | VRGKLSRNVAEMAVKEMREVDERKR |
| 1125 | DVEKLVKEVQKLAKKRGDNRAHVLAFVILLMYRRGLISSE |
| | IASRVLESVAKRLKG |
| 1126 | SEERKTLARLLLIAKRAGVPRFIVLHVNGRLQIIFKGDSP |
| | SVQRARKLAEEFSKKSGIPLKVRVK |
| 1127 | DLDETVKKIAEDVAKEAGVPSFRVRVSNGKLTVRFKGNNE |
| | SARRAFMRIRLLLRRLGVPVIVQVV |
| 1128 | SRVKRLSVRIVMLLLFARKAGLIDPEEVERLYEEVNRLAR |
| | KGDWKQLQKLFRKILEEIRRR |
| 1129 | SLLEELLELLKRYVSPELVERVERLLRALLRHGFSPQLVI |
| | LSVIRLLEARGDPELARLLREILRR |
| 1130 | DQDRRILEIIHQIAEEANVPSFTSYVSDGIVFVRVWGNDE |
| | AAKTALTRIKKTAEKLGVQVRVRTL |
| 1131 | PELRRLTARLLFLVVQAIRRNDEDTVRTLLKIAKELADRN |
| | PKYKFVFLVLRSMIFRMRRRI |
| 1132 | DKSETFSKLAKEIAKKVGVPSVKVYNIRGRLLVTFRGQDR |
| | AARRAALLVRRLADKLGVEVRVLIQ |
| 1133 | SRHRLVSQLIRKAARRAGVPHVDVRVKDGTVSVTIDGTDV |
| | AARAVFAFVKYVSKLLNVRVSVTEK |
| 1134 | DEELIERALELIERGDPSVRKVVAELALLLARKGDRRRLS |
| | YVARVLRLLKRDPRAAKQALKILLS |
| 1135 | SRLLALSIFIWNIARAAGVPSVTVRVKNGKITVTVSGNTE |
| | SAKLARRAVEAFARRYNVDVDFQIR |
| 1136 | SELLRFRLRLRRVADRANVRRVTVFRINGKIFVLIKGNDD |
| | SAKIVEKFVRTVAKKRGIPVVVKLE |
| 1137 | DEKEKTVRSVIKRLQELSKKASDLRKRMRLIMLSKILTEA |
| | LKEDKDEAHKLAQRVKEMLDKD |
| 1138 | SELKEVVERVLKGELSPSEVLRVLAELYRKTGDPRYRNLL |
| | ARLYLARRRGDPELLKRILELIRRA |
| 1139 | SRERIARLMMIAFEKGDRRALVVVAQAWFALRRGDEKTAK |
| | RLIKLASKLLS |
| 1140 | DKETAFAALLRAMAKRAGVPSVRVEVSNGKVTVSVKGTDD |
| | AAELFRLLVMFLAKRLGIDVDVQIR |
| 1141 | DDRDKLARLVIKAMELADQIKDERWSLHVKTLIAHAWFRN |
| | DTKLAEEVLRLAKKIVESVQ |
| 1142 | SERKTLYQLVARLAQELGVPRVLVRLSEGEFLVFVFGRDE |
| | SAQTLSKILTTWAKKVGLKVEVILR |
| 1143 | DEEVSRAYRLAAKLGDPRLAALIRLLLKLVKRGDPNLRLV |
| | VAVARRLAKELGDPEILEVLEKLLK |
| 1144 | SSEEALKLIKELAPPEVRIAIEALHRHLKRQGLPPRLIVQ |
| | IIIKFLERRGVLPPEVAKEARELLR |
| 1145 | DRDEEFQKKVESAYRRLKERNASDKRILSYIARLLREAQK |
| | IGATKARKLAAEIALRLARRLD |
| 1146 | HEEIAKKLKKKVRTILDQLNASDEQKVRAFELLAFAERVL |
| | SRISDKRHAKREADEVTQMISNM |
| 1147 | SEELEEVLELLKRDPKKAFRLLAELAREAQRRGDPELFKV |
| | LMLLLIYIRLGNLKLARQLLEVLLK |
| 1148 | DKRQVLRVFEKAFHHMRHHPQVKKLAIKVMMLAVQAKKQN |
| | NPELLKQAEELLKEVEKRAK |
| 1149 | SAEEVLELIKELLPPDVRREVERFIRKLREDGVPPEKIVE |
| | LIRAALKYYGRLTPEIERLVRELRK |
| 1150 | DVVKLVIEVQKLAKKRGDLRAHILASRIIFAFMKGLMSSE |
| | EASKLLKTLAKRLKG |
| 1151 | SELEELLERIKRTGDPKLIARVARLLFELAEEKNDPKLAR |
| | LAALVYFYLRTGNPKAAKQILKRIE |
| 1152 | DERRRFIARLLQVAQEANVRRVLVMYANGSIRVEINGNDD |
| | SAKIVEKFVRTVAKKRGIPVSVTTR |
| 1153 | TEARRLARLIAEYARKAGVPHVVVVVLNNHVFVREDGNTD |
| | SVKKASEFAKEVARQLGIRLRVVTR |
| 1154 | SPETLKLALFIALVRRLFKNGEIDPSQAKTLLKRLQEKAK |
| | KIGDHFAVRLAEHAIRAIKKAEKS |
| 1155 | SDELSKKLEKKVKDALKKGDKRLAKFLVIKAILEAKRLND |
| | RKLEHVAARLALLIFKWS |
| 1156 | DLDEEVKKTLKKLYEIAKKDPSKKDEVEKLLVKVAAHAHF |
| | RIQNPEKRRKALELALTLMRRIG |
| 1157 | SFEEVIRRAIKLAEKNGDKHALVELKVILFLARQGKMSEE |
| | LAERVARTIEKRLKS |
| 1158 | DKEEAERILSKIHELARRKNDRKVQRLVMRLYFALQFADK |
| | KNNKKMVDDITRLAKELLKKVES |
| 1159 | TKEKLREIVRLLREGDPRARELLRRLLKELAERGDRRLFF |
| | LVFAILRLLKRNPEEATKLLAALAR |
| 1160 | SDESRKLQRRLALIFAALRQGFISNDEAKELAKRVEEKAR |
| | KLGDKHVRQLVKFVKDAIERAG |
| 1161 | SLEELEEILRRLARKTPAAAILLRILERLRKRGIPPRLVL |
| | RALLLFAKHLGDPELEKLIERVLRK |
| 1162 | TRELLLRVLILLWQLRTPIARAIIAFIYIAKKEGVSPEEI |
| | LKIILKLARRAGDEEVVRIIEELSP |
| 1163 | SLLEELEELLKKLNTPAARMLIALLRRLLEEGRNSPKLIL |
| | LFLWLLARRLRDPEVVKVIREILRK |
| 1164 | PVYVFISNVTPEAEKIVKKIARLGRVIVIKRPGNRIFVYV |
| | QNPELAKQLVELVRKAGARVLIER |
| 1165 | SELEELIERALKTKDPELLKKALLLAARLLDETGDPKLRI |
| | VVAYLWFAKARNNPKLIKRALKAAR |
| 1166 | SERRTVRRLLMEAALRLGVPFVFIRTVDGRVYVFVRGKDE |
| | SAQTLSKLAEELAKKLGVKLHVRRR |
| 1167 | PLEKLARHVVTKAKEIVKKAQDPRLSKIFKEIADKLETAL |
| | KNNDEKTVRYLIAKFFFLKRRLS |
| 1168 | SSEDMRKVFIMVLILAHEAAKDEDLERKARKKLDKILKDL |
| | KVPNAHFFKQMEDLLVKKVRSKLS |
| 1169 | DREEKITTLVKEAAKRAGVPHVDVNFSNGRIHVRVRGNDR |
| | ASRRLFAFARNLALAYGVQLQVLNR |
| 1170 | DPTRHKLMLNIFLVLVLFKKGKIDPSQAKTLLKRLQEKAK |
| | KIGDHDAVHVAELAIVRIKQAEKS |
| 1171 | NRDRIRAELLLWAIARRLERNNLDPRLVRTAIQVVARRLQ |
| | REIQNPENRKEVQTVAEELIKRVM |
| 1172 | DRRERQLKLLIDELVTRIKKYNPELAKKVESIVKKAEDNQ |
| | DPNLLVKALLVAIKALKTVSS |
| 1173 | DPKKLDELRKKIETLLRKVTDPTAYRLVMRALFLAIMALK |
| | QQNPLLEQLARELYEKAKKIQ |
| 1174 | PTEEVIRTVMLLVFMARRSQDPTRVEKLLTKAEKLAKNIN |
| | DPRLEELVKIAKKQARSILS |
| 1175 | DLKVISRALLIVLKIQKKYPDPREAKKVAKEVLKRIVDSI |
| | DDPKERVRVFFFAHMLLRMIG |
| 1176 | SELAELLEEALRRNDPELLRRIVRLLARLAEKREDPRLWR |
| | LAALLWFALRTGNPLLIKAVIKKLK |
| 1177 | PEELRKLLELIERGDKKKVFELVRKIAEKLKKKNPSLVRL |
| | LVAYVELALRGSPAARRLLRSLAEK |
| 1178 | SEEIFRKLMFAMFIAKRTGDPRFKKIAEKLNRILETIAKR |
| | DQDPDAKRLLRIFRQAAKRRKKS |
| 1179 | DINARIFLLILRAARKNDEKLARELLDKSKKDPQVESAVE |
| | RLRWEDPRVDKAYKILEKVVS |
| 118C | DKKLREELLRVALEAMKKIKDPDTQKSILKIAAQAFFRAR |
| | NIDDPTERDKVLKKWLKLLKDEIS |
| 1181 | DEKAEKLILKVKMFILMIKLAQSKEMKSKASEAAKRLLTE |
| | ISKIPDEKAQKIVKKLKEILDKLS |
| 1182 | SQLEELIERALKTKDPKLLRHAIIVAFLLLRRTGDPKLRE |
| | VLHLLAEAFFKKDPELIERALRVAR |
| 1183 | RYTEHVFFVWEATDEEARKRIRKRVEQIEREAKEEAKKRG |
| | REPQTYFVERTRDGYVSAVLIIIVE |
| 1184 | DDRRTELLSRLVKKLLEQARQISDPRQARKISLKLHMVKN |
| | LAQNPKVRTLADRAIKQVNSIVRS |
| 1185 | SKLEEVERLLRELAKKDPYAYILLRLLKKLKELGVPPERI |
| | LRLLVAAAKRVGNPELAKLIEEILR |
| 1186 | SVLFEVAMVALELGDPRLEILVIRAILLLKRGDPRVKEVL |
| | KKLVELLRKLGNPELAKKVEELLKK |
| 1187 | SKHEKARKALAMLLQIAVELGVDRRYMVRAMFIFLELVKN |
| | GVDLDQARRIAEKWLKKVVKS |
| 1188 | NRADQLIYEVRKIAKRLGAPDVKVDVRNGRVTVTIKGTDF |
| | RARAVAAAARIVARLLNLELDVQIR |
| 1189 | SYVERVVELLKRLGDPVARELAELIEEILKRNYMLAMFAA |
| | QMAEEALKINDPDMLDQLIRFLKHH |
| 1190 | SAAARVALLVRRVAEKLNVPNLRVEVLNGKVQVLIRGDDE |
| | SARTAYKIVKKISDTLGAPVRVQIH |
| 1191 | DKFAIVMHLLFLAKRASKRNDKLLVLFVLRLAKRLYDKHP |
| | DDEKIEKVLKIVEKIYRKVE |
| 1192 | DIEEVLERLKELIRRGDPRVRRLLARVAMRLRQRGDPRAR |
| | RFFLAFFRFAAGNPEHALSVIRKLP |
| 1193 | SELEEEFEEALERGTVEEFLRRLYRELAREGDPRSAALVL |
| | AAFRLVKEGDPEAAKLALRIIERRR |
| 1194 | DPTRRHLMSAIFMVLFLFKKGKIDPSQAKTLLKRLQEKAK |
| | KIGDREAVFLAELAIRIIKKAEKS |
| 1195 | DDRLRRELFLVVVRVARRIGLDRHAILVAALLAARLADKG |
| | VDPTQAERILEKVLRTIKKRKS |
| 1196 | DEEDKVRTTVTEIAKKAGVKGFHVTVRDGKVRVVLKGTDE |
| | SARRAFRLIFQARHKNNLKVFVLRF |
| 1197 | MEKYHRLLTKLSRLVIRAQQIPDKDKARSLVKTVAEEAIK |
| | SIDDPTLRIRFFFFVRFILENM |
| 1198 | TLKEVAQLLQEILQHVPDPRVRRLILIVYLALRKGNPELA |
| | ERALEEVIKRLGDPRLREALKLIRR |
| 1199 | DKDEVLELAQRILKEVQERGNEEYSRRILALVAAAFTASR |
| | KNDEDELKFILKVIRELYKKLQS |
| 1200 | NLSKHVAAAARIIARFVGVPSWSIDVKNGTVTVSLKGRDS |
| | RAQQAAYMIERFAKRLGVPVDVQVR |
| 1201 | SNSEELAKLIRQVAREANVPSFSVDVRNGTVHVTLKGDDE |
| | SFRRVFVIALQLAADLRVKVRVTVR |
| 1202 | GPEEVIEIIAKALGVPPEKVRRAVELMRKRLRIPPERALW |
| | LLLNLVKRLDPRFKEEVEEARRLLQ |
| 1203 | GEEEALKILAEVLGQSPEKIRAAVRHIRRRFNVSPEEAIL |
| | LLAKLIARHLNDPRVAEEIRKALEK |
| 1204 | SDRKIAARAIRIVARRAGVPSVEVTTINNTIRVTLQGRDE |
| | AVRLAAIFIWNISRRLNVPVEIRIR |
| 1205 | DELQKIATRLIKLAEKKGDKRLAMIARAVKFMIKRGELSK |
| | EEATRLLRQIEERAS |
| 1206 | SEFREVIRLLEELGNPRVARFVRLAWWLLRLGNPENAKAA |
| | LKAALRLAERLGDEEAKRLIEKLLK |
| 1207 | SARKKITRILLELADRGDPLRKHVVRVWFILRKDLDKAEK |
| | LVRQLIERFGDPLLREILELIKELK |
| 1208 | SSREELKKLVEKIAKKVGVPSVTVVERNGKILIVLKGHDE |
| | AARRAALLIRRVAEKLGVPVRVVIR |
| 1209 | DWRHAALLLAVIARIAKQDNDEDLLKRARTLFELLHRAAQ |
| | RGDEDTVKRVIEEAKKLAKDL |
| 1210 | PLESMARFVVKRAKEIVKKAQDPRLSKIFKEIADKLETAL |
| | KNNDERKVRILIAFFFVLRQHLS |
| 1211 | DDRTARLLSKVVKSLLEQARQIEDPQQARRIQVKLFMVKR |
| | FAQDPRVKTLADRAIKQVKSIIKS |
| 1212 | DQEELEDMIKAVEKFAEHLERNPDPKKKKAAKIVKDAVKN |
| | AKQIPNPRKAKKYLMIVVERLRKS |
| 1213 | NVEELAKKVQKLAKKKGDRRAFLIAFVLVRALRKGILSEE |
| | FAKRVLEFMEKRLLK |
| 1214 | SEETVRKAFQVATRRGDQKAARTLMRILEMLRMGVLDEEE |
| | QKKADKYAKSVIS |
| 1215 | DEFRRKAARLALRHLEILRNLSEEEAKKWARKILQEAAKK |
| | QDSALWIAARAALDFWRRALKD |
| 1216 | SERLELIVRTLAHLIRFADERLRKLIFKELLQLHEDELRK |
| | SSHFLKRASDEEIKKTAEEIIRRA |
| 1217 | PIEELIKELSKRVPPRLRQYLEAALRLKKRNPETARRLLA |
| | IVIYEILRLDPNDEIARKVLRLLMR |
| 1218 | SETSKKVREFLELVIQRGDERKEMMMIRFAKKRGLLSDEE |
| | LDRWRKRFEKVKK |
| 1219 | SIEEVVEKVLKEAREKGDQRVVLLAEALKRALERGDKRRA |
| | LALLIILRRLVGDPELRKAATLLVR |
| 1220 | LERDILTAFIIADELKQEFKDDPHIKSLVHRALIELMRAW |
| | RENDEDKIKEVIKKIKTIKKKADS |
| 1221 | SLLERIEEALRRNDPRLVLLLLAELLHLTGDPRVRFVLVY |
| | FYFALKEGDPEKAKELVKELLKRVK |
| 1222 | DQMERLRKLAAHIVMLAQKVGLSPEIIHRIARKAFQVFQD |
| | RDEDEARKWVEEVINRWKKKL |
| 1223 | TKEALRLILRLLDKRPDDSLLRRIMAYIFIAKRLGNPEFV |
| | ERIVRQLLKRTGDPRLKEVLELLKK |
| 1224 | SEELVERAVKFAGLSPHVEKILRAVVRVLERLGASPQQIK |
| | YILTRFLRRLIPDPEKLRRAEEILR |
| 1225 | DEELKKLLKIVVRLLIEADENNDEKSARLARRAYLLLWLA |
| | KRADEEHQRQLKTLVKQLIKKIK |
| 1226 | SLELVEEFLKKARTPRAFLLLRLLERAKKQGLPPEKVVEL |
| | LRAAAKALGNPELAEEIRRLFEEAP |
| 1227 | DIEEALELARRLGAPPRVVDYVEKLARRLKEKGLPPRVVL |
| | ALALYIARLLGDPLLEEAIKRLLKK |
| 1228 | TEIKKIAAAVERALREGTLEEFLRELLELYRKKGDPRILH |
| | RLLIAISIARTLSPEAREIVKRVRK |
| 1229 | DDRVKKARKIASTILRRLGVDEAEIRAAEAIVERLVKKGV |
| | DPKDAARVAVLAVRFLLRIRR |
| 1230 | DAIRRIAELAHRYGDPLLKLVVAAVWLLKRDPNDRAARHL |
| | LRALEQAAKKKGDPVLEEAIRLAKK |
| 1231 | PEIMVMMVEKLITLLKKLAQNPEMRKDIERLEKEIRTRIK |
| | KDPRFARKAFMILLQLYHFLKQQM |
| 1232 | PHREVERLLAELLERARDPRQRSLLRLILFALHERNEEML |
| | KQLLEALERVLGDPELVRKLEELIK |
| 1233 | PEARQITLRLSLEVARAIDRNDEDTVRTLLKIAKELARRN |
| | PQYREVFILLYNFIHRAKRAL |
| 1234 | DVEELLEELERLGLLDPELLELLKELIRRLKEEGDPEKLR |
| | KLHLLIAMARKDPLARFLLHFLVRK |
| 1235 | DEARSLALEVAIRAILKARQLNRPYDVTFTVGGQKYTIRV |
| | DTDPSKQRRALRRILLIFMRYAFK |
| 1236 | DKTEIIREMLTELAKKIKSVSDPTQKEKLKRHLFLLVFIL |
| | KNAPDPTEREAAKYAETLIKRILS |
| 1237 | DPRHEALRRVFSRLYLLLYRLTNPEEKKKAQKWAEKVLQE |
| | AGVDPQIARAAVEIVTREADRAR |
| 1238 | DEELKTIRSIVETLLEKARRNNDERSRRLARLALFLLERA |
| | RRADEEERKVLKRAVKALIKAIK |
| 1239 | SDELSKKLEKKVKDALKKGDKKRAHLLVVHALLEAKRLND |
| | RKLEKVAAKLEMLIQKWS |
| 1240 | SEAEEISRLLRLAAKALGVPSVEFDVDNGTVTVTVHGDDD |
| | AAQILWSLVRRVSREEGVPVRFEFK |
| 1241 | DETSKAVPMLAKVILLLKRNPNNEEAKKLYKEAVTIAQKV |
| | IKKLKDPKKQRHLHFLIHLATLES |
| 1242 | DEVERVLEILKRLGVDPRLLQAARQLFRLLRKKGLDPEQV |
| | RLLVAVELRRRDEDASRLFRKLLRK |
| 1243 | SERLFFSLRLRGDNRTSRELAEAWARRLAERAREEARRRG |
| | LEIRVHFRFTRENGKLTVTLRLHIR |
| 1244 | DVEKKAKEAIKLARKKGDKRAVLILHAIAVMYRRGLIDKN |
| | DADKLIEFIIRRLRS |
| 1245 | SAVEKAVKIIKKLAKDLNIPRVQVRYRDGRILVLIHATSP |
| | EAKTLRKLILEVARRLGVSVEVYLQ |
| 1246 | SLEELERLIRKLVKEGDPAARYALRVLRLLKKQGIPPDFI |
| | VAILLKELRRLGNPELIRLAEKLKN |
| 1247 | NYMRVIMRAVELALKKGDKKAVRILFHIAMAARIGTLDPT |
| | KAERLARRIEKKLRS |
| 1248 | SLEEEVERLLREAGVPPKIIRLLKAIIRLLLKRGIPPVAI |
| | LRILIKFLEKLGDPRAAKLLEELLK |
| 1249 | SEDEKIKKRVKEITKLAGVPSVEVRIKDGTLTVTVKGDDR |
| | AVRAALARLLNLALLLGIPIRIHVR |
| 1250 | DKEEEKILELLKQGNIEEAIKLARELARRLKDPRLAIAAA |
| | AIKHLLRRGAPPQIILYVVRRLLEP |
| 1251 | DEKEELEELVKKLGSERWERMVVYLIARRLGVPPEEVLKR |
| | IYELVKRLKVPPKSAALHLLQELNS |
| 1252 | DAEKIIRAAVRAFARLARIPSVTVRKSNGKFHVKINGRDA |
| | LAQQVAYAIKRIAKKLGLDVTVEYR |
| 1253 | SESDKLSKRIKELLKKAKEKQDKRKAMLAYLLALRVLRRY |
| | PDDEKIREVLKEAREVVRKIYK |
| 1254 | VPELERVKELVDRYAEKVGLSEEEKKKLRKLVDKLYKKGL |
| | SPMQVAIFVILFIRDLKKKL |
| 1255 | DVLEKVLKFVRKKNEQLARAVEALIRRLRERGVSPRTILI |
| | LLWTILRKAGNPEAVELVEELLKRE |
| 1256 | DELKKAAKELAKLVKKGLLSPLKAIALLIDIARKLGASKE |
| | EQRRALAALLYLIRH |
| 1257 | SEVREILREAARIPDPREVKRLVLKAAKLAIKLGDPKLAR |
| | LAALVYFYLRLGNPEAALHLLERIG |
| 1258 | TKLLRALAILYEKTGDPKERSLLLVVFIELRKGRRSPEEI |
| | LELIKKLLERLGNPELAEELERLFK |
| 1259 | DELEELLRELRKDPRLRAAVLLFRALLRQGYPPELVSIAV |
| | RHFLRRNGVPPELIEKLLKILRDLG |
| 1260 | SLQERFQRLARAAARYLGVKSVTVRVRNGTVHVTINAPDT |
| | RAYILLKIIKKVAEQEGVPVDVKIK |
| 1261 | DVERVRRRIFVVLWFAHQQKDPRYADLALKLAQTLVKLYP |
| | DNAHARAILREVKERVEKIKS |
| 1262 | DERRRLFVAIRNIALAVGVPSIRVVIHRGKFRVRVSGDDD |
| | NARKALKLIKEVAEKLGLEVTVEYR |
| 1263 | DVEKLVAEVALLALKRGDSRAMWKAIAILLNYRRGKLSSE |
| | EASKLLKTLAKRLKG |
| 1264 | GPEELEEIVRRELPPKVVRYVRALIRALARLGAPPQIINY |
| | AIILFLRKQGLVSPEELEELEKLLK |
| 1265 | VREEALRIIFKAILLLMNGQISRREAAKIILLAREASKKN |
| | DEELIKKVKSLLDSVEKKNQS |
| 1266 | DLKQRVRHLMIRILLLARKKQDPRLRRLAARLALLAIEAQ |
| | ERNDEEKLDKVRKEAKKVVDSG |
| 1267 | PPVLERLLELLKRLGNPLREAVRALLRALRRGEIPPEKVL |
| | KRLLFAAYRLGDKEFFKLVAELFRK |
| 1268 | TRREAMFVLEVAHFAYRKGDKDMVHAAYEVAKKLLEKEPE |
| | DERVRKVLEIVEELLKKVS |
| 1269 | SAAEEALKLLREVLPPEEREILERILKELRKRFPPAAVIF |
| | LLAKILLKLGLIPPQVAAKVLEILR |
| 1270 | DAQRTVEKVIRHAQEFVSKKGDERIKKQVDTLAKKAQTLL |
| | KQGDEDSALEVAALLMHLLWVVKR |
| 1271 | DSEEAEKIIRRVLIFAIFQNDKKIFRSAFELLKILEEATK |
| | KGNEELIKKVTKIARKLLSYV |
| 1272 | SREDLFAWLLRRVVKRLGVPSVDVKVSGGRLTVKVKGTNQ |
| | DARLAAAAAKVLARFFGIEVDVKVK |
| 1273 | DERRRFISRVLQIAQQLGVPRVLVLVKNGRFTVRVRGTDE |
| | RAQKAKEAIEKLAKRLGLEVELKDG |
| 1274 | GPLEELEEILKELAKTDPAAKILLAALKLLRRRFDPRLVL |
| | MILELVARRIGNPELLKIIREILRK |
| 1275 | SHLERLIERALKTKDPRKLRIAIAYAWFLKERTGDPKERR |
| | VVDLLARALVEKDPELIERALRVAR |
| 1276 | DEDTKAEKIAKDVLKDLVKKATTEREVLRALLHAIMVIRT |
| | LIPDQEKAKEVRRELAEIALKWI |
| 1277 | DREELKDLVSKVEELVRKVIKDPNYKSMATRLIKKAKELA |
| | KKGDEESAKRVIWMLIAIVFMYKR |
| 1278 | DVEELLEEAVKINDPRLVREALRLLFKLLDRTGDPKLKRI |
| | IAYLLFALKKNDPKLLRQVVELLKR |
| 1279 | STESVKKALKKALKSGDARKAFRIVMLAKVEGLISEKEAR |
| | KWRNLILKVSSI |
| 1280 | SELEEELKRAIEEGDRRLLARLLERLSRLLGDPRRAVRLL |
| | LRLIARVLNVPPEEAAKILRRLLKT |
| 1281 | DPTRHHLLKRIFMVLMLFKIGKIDPSQAKTLLKRLQEKAK |
| | KIGDKAAVSLAELAIVLIKQAEKS |
| 1282 | SREELLEELEKKARNPELRDLIRLLKELLRRGDPKVRRVL |
| | FLLFFRARLNGNPELARLVMKVEKT |
| 1283 | SEQHLREWIKKVEEQIRRGTITIRWAMIVHILIRQAQKLG |
| | DEEVEKRLRELLRRIAEVFH |
| 1284 | SIEELLEKLLRELGVPPRQIKIVKAAFRRLRREGLSPERA |
| | LEVLTILLRQRGNPELAKAVRLVLK |
| 1285 | SERHIKHALALLRRGDPKRALFVLYYLARRTGDPRVKELL |
| | RLLLEAFLKNDPELLKRVRRLLEET |
| 1286 | NEQDKKFAKRLLDQAKKLADQISNDRERKKAQSLVEKARK |
| | IDDPNVAMKVEVFVHLIYRHVQK |
| 1287 | SRKVIRELAMYVTRVAEKLGLDRRAFPRAFSLAYLLAERG |
| | VDPTQAKRILEKFLRTIKKRKS |
| 1288 | SLEEALEIIEKELGDPKLVKQLRAAIRVLKRFGADPFLIL |
| | RILRRILKDADTPEARLALKILEET |
| 1289 | SELEKILREVAKRVYKKKGDPRTIMKVIYQIVQRLIKTLG |
| | LDEEQQRELMKRAFMVWMDVV |
| 1290 | SEHLKRILKAAVRFIARLLGLDEKAQKIAKKVAEKLADKG |
| | VDPKEALRLLIRVLQQLYVRLR |
| 1291 | DEVLERLRKLLRKLGNPHLVRVVEAFIKYFRRLGLDPRMI |
| | IFFLLKFARRLGDPELTRVIEEAIK |
| 1292 | SLLEELEELLKKLNTPVARLLIRVLRALLKRGRESPKEIL |
| | QILWSLARRQNDPEVVKVIEEILKK |
| 1293 | DELLEELEELLKKNDPKVRRLVLELLRLAEELGDPELFKR |
| | LRYIAAAVELGNFKLALQVLKHILK |
| 1294 | PEKEILKTLYKLIQEALKKNDRRKVVRLYILLLRLMRRAQ |
| | TEEARKLAFKLLLLVIDLG |
| 1295 | TEELEKLLEELLEKTGDPRVRILLRALRVLLRRLDPKQVV |
| | QILWSVARRLGNPEAQRLIEEVARK |
| 1296 | SLEELVKELASEALGRPPEAVEKALRHISERFQIPPKRAI |
| | RLLVRALLHADGDPRLKELYKLVTK |
| 1297 | SELLRSARRLLAFIALALARGVHABEIIRWLEEWLKRARE |
| | NQNKQEIYSAQAALLHARKWLER |
| 1298 | SPEEKAKKLAEAAVKELVKLASEQIAKYNVSREVEMVAKD |
| | ENLDDSQTEKLQKYAQTLVHQLYS |
| 1299 | PYEEEIKKYADTLLTLIKNAKDPRQRRRLSKELFTTLLKL |
| | LKAPNPEKRAAAAQVIFKVFRVLK |
| 1300 | KEIAKKLADKLVTEATKLATSSDPNNRTKAHKLILRAMMF |
| | ARFANDPNVYRKVQSVYQLIRKLG |
| 1301 | SVELIEEALKLLGDPDARILVALIRYLRKLGVPPRIVEQI |
| | LEKAARQLGSEEIFRRAKELAERLP |
| 1302 | SKHEVDLLVAFVMVIARTRGDPTARKIAAKLALEAMKAKD |
| | NNDDEKLKKVSKRLKSFIKTE |
| 1303 | SDEEDRLLKRALAYLWALKAGKISVHLAKLAVRRVIEKAR |
| | RLGDEKAVKVAKKILEILKKIEKG |
| 1304 | PEELYKRATKILTEAKKRAKDNPEILRAIIRLEFLLRVAY |
| | KQNNEKTLKAVVKLVERKIRTLLS |
| 1305 | PEAKEVERTLLEVLHKAREDGNKEVVKLASALVAYFFFAR |
| | KRNDEELLKKVITLAKKVIKKQ |
| 1306 | SPVKEIINRALQILQKLLRLGLISPEEAQRLALFLLLAAK |
| | EGDEELARRLYKKIEKIRRKLS |
| 1307 | DKEYVKRLVEELIKRGDPHRALMVLFVELQHTGDPDIRRL |
| | ERLLARVIIRYPDPREVLKFFKKLK |
| 1308 | SKEEEAEKLLREVLPPRQRKLLEAILRILRKYAPPQLVIW |
| | LLAKILLRLGAIPPEVARRVEKILR |
| 1309 | SEDEQLSREVEKTIKKAGASHVLVRVKDGTLRVLVRRPSP |
| | EADQVLNKLRQKAKKLGLKERWFIE |
| 1310 | SEELKELVERFERGEIPPKELFRLILRLLQRTGDPKLKRI |
| | LAYLLFLIRRNVPPEEITRWLKAVT |
| 1311 | SELLRVMEVAHFLARRAGVPHVHVRVSNGRIQVTLKGTDE |
| | RARTVQKRLTQFVRAFGVDVDVQVR |
| 1312 | SDELSKKLEKKVKDALKKGDKRRAKLLVIEALVQAKHLND |
| | EKLHHVAVRLMFLIMKWS |
| 1313 | EEAREIIKLLFRAMQLASKKGNEKVVRIIKHIMARLFVAL |
| | RSNDEKMIEDASKKAKKVIKII |
| 1314 | PEEFLEEIKRLLEKLRTPAAWLILRVLRKLEELGTSPEEI |
| | LRILRALARRLGDPEVLRLVEEALH |
| 1315 | SKLEEVLELLKRVPDPRVHAVVAAILALLERGRYSPRKLL |
| | LLLHELLKRLGDKDALELLERLRRR |
| 1316 | TEHEKVRLVVEVAERLIRRGDQRRAQFVLWIAELLVRKLG |
| | DEKWLKIIEELKKELEKLKKK |
| 1317 | SVEEVVELARREGNPALAANLENIIRKLKRRGVPPRYILV |
| | ALLYVARLAGDPEVARFIHELAKSP |
| 1318 | SVAEELEELLKRGNAEEAEKFLRELVERHGDPRLRIALRL |
| | LERLKKSGVPPEKVIRFVVAALRRL |
| 1319 | SEVARRLLELLKQGNEEEARRLVLRAAIRAAREGDKKLAH |
| | LLALVYFYLKTGNPAVEDLLRELEK |
| 1320 | PKERIKELARRIKEGDPEAKKELAKLFLEAVRRGDKRLFL |
| | AIIFILALVLRIPPREAARLLIRLG |
| 1321 | DKDKLLEAAVRVVARVAGVPDVKVRKRNGKVEVTFRGTNH |
| | QVQQASEMVKKIAERLGVTVTVRFE |
| 1322 | DERRRFISRVLQIAQQLGVPKVLVRVKNGRFTVRVKGTDE |
| | RAQKAKELIEKAAKELGLEVELRDG |
| 1323 | SLRLKVAFLLVKAGVDPRLITRLLQYIHQLERRGVSPEEI |
| | LKILIKILEELGDPRAAKLLRELLK |
| 1324 | DKEEVIKTVTKLENEYTKRAEDPRKRLWAKAVVKMLQDLF |
| | KKDPDEAEHLARRISETVKKKLS |
| 1325 | SELKEVVERVLKGELSPEEVLRILLELAIRKGDPKYIYLW |
| | LWLRSALRRGNPELLRLILKQIRRA |
| 1326 | DRRRRFRLTQQILTTALELYKRDSRQAEKFLKTLKEEARR |
| | HNDYALWIATRLAEREFKSDTHD |
| 1327 | SELMEAVELARREGNPTVASFLMQLLFALKKGRISPEEVR |
| | RILEELLKKYGDPALELALELLRRK |
| 1328 | SRTDRVVKRLREILKEAKEKNDPKLAIKAAMFAHVELKED |
| | PTDEKIRKVEKEALKVALDLLR |
| 1329 | SEIEKKLRKLFKKAHEKGDLRALAYVLFAIKFLRRGKLDP |
| | RAAEQLARIAERRLRS |
| 1330 | SNSEELAKIIRQVARQARVPSFSVDVRNGRVHVTLHGDDA |
| | AVRHVLARAYMLARRLNVKVQVEIR |
| 1331 | SEDEKSKEISKTIQKLAGVDRVQVRIRKGRLLVFVRGSDE |
| | RAQTALRLALEIAKRLGVPVTRHVQ |
| 1332 | PMDTEMVELAKRLADEIKKLAQDPNLQKKADKLKKLVDEA |
| | YKKNDHITLREVVAMIILLWKRVL |
| 1333 | DQREILKVEREAWHTIRDASDRRVRAALRHLLVRLYEALR |
| | RKDEEALKKVLKRLKELIKEQK |
| 1334 | SVREAVEIILKRVGVSPEKINQLKANLWVLERRNPLAAEW |
| | LALKIIARVLNVSPKEAQRLLKELQ |
| 1335 | DKEEKIKKLAERLARRAGVPRVSITFHRGRVTITVDGPNS |
| | AVRRLAAYIFLFAEKLGIRLSVRSK |
| 1336 | NELFRLFEELVRRGISPEEILKLLVKLLREKGVDPQEIWR |
| | RLALILLQLGISPEEVARLVQKAVR |
| 1337 | DKDDEFLDKVRKTYESLQRNNVDPNQIVKILARLSMTAME |
| | LGLTRAMIFVIQLELKAKQQAS |
| 1338 | VREEAEKIVRKARTMLKKGLIDEKEARKIIFLALHAAKND |
| | DEELIRLVKRLLEQFEKKRQT |
| 1339 | DEEFRVRMLIRFLARLAGVPDVKVSVRNGTVHVKVRGTDR |
| | AARTALQVARIVALVLGVPVSVTIR |
| 1340 | SRDKAIRRLAELLGLSPEEVKKRLEELERKLGDPRRAVQV |
| | ELSELHRRGELTPRVRLFLLLIKRN |
| 1341 | SKKEILEKVLELLKKDPKKALRLIIELLRRTGDPRVKRIA |
| | AYILFLERKGDPAARDIAEKLLKET |
| 1342 | DEVLERLLKLLRKLGNPQLVIIVEALIKALRRQGLPPRLI |
| | IQVLAAFARKRGDPELTRVIEEAIK |
| 1343 | DFVIVFVFEGRRTRTFFFRSEEQAKELVKRLQEKNPRAKV |
| | VTRHRGDRVIIFVDV |
| 1344 | SKEDEISKTLEKIAKRAGVPDVKVTVRNDRVKVEIKGNDR |
| | RALAAYLLLLRVARKLNLKVSVLLK |
| 1345 | DEKQQKLRRIAIRIFAFANFVGDPNVRTEVERLAQHIMTV |
| | VQRDPDKAEELLRKEMTKVRRETR |
| 1566 | DDERLATDAFRSLIKRAGVKNLDVKVINGKVRVTITGRDQ |
| | ASQKALQKVFALARRLGLQVQIDTR |
| 1567 | SEQDKQVKKLTDIQREAYKHNDKETIEKALRTAASFARQH |
| | RDPKFRELFRIIHQLRQRVER |

TABLE 9
TGFb binding polypeptides

| SEQ | |
|---|---|
| ID | |
| NO | Sequence |
| 1346 | TCTIEVVGVDPEAVEAIAAAFGAEVREKDGKLEIHLDDPH |
| | GAESAAAAISVLANVRVRLQC |
| 1347 | HCTIEVVGVDPEKVEAIAAAYGAEVCEKDGKFEIHLDDPH |
| | SAESAAVAISVLTNRPVRLQC |
| 1348 | DEHERVRKKVEKVVKDAGVPDFDVEVEDGYVVVLIKGSDE |
| | SSQRARKAVIEWAKEQNIPLTVLEL |
| 1349 | DLHEKLKELAEFLAKLAGVPRVSVDVRNGTVSVTCHGRDA |
| | HCLALLLLLRLEARRQGLEVRVTVK |
| 1350 | DQITVIVHVDDPSLAEWVAKQCADQFLVNGKTVFLIVDGV |
| | DPTEAKRCVEELAKKANLEVELTV |
| 1351 | DEHERVRKKVEKVVKDAGVPDFDVECEDGYCVVLIKGSDE |
| | SSQRARKAVIEWAKEQNIPLTVLEL |
| 1352 | SLEEKLEEALKRGDEELVRRILEKILSEALDIPPEEVKEY |
| | LRALEERAGNPEAVIFLVLNLEQRR |
| 1353 | DEHERVRKKVEKVVKDAGVPDFDVEVEDGYVVVLIKGSDE |
| | SSQRARKAVIEWCKEQNIPCTVLED |
| 1354 | TDEELEKLAEYAAEAGDTEALLEIYSLISALRLGAISPEQ |
| | ADELARRIKERLDK |
| 1355 | DVEELVKFILELLKENREAAEFYLAHLLEKLGIPPEEIDE |
| | ILKRVAELFKRDPEKARELIEKVLR |
| 1356 | TVTIEVCGVDPEAVEAIAAAFGAEVREKDGCLEIHLDDPH |
| | GAESAAAAISVLANVRVRLQE |
| 1357 | KVIIIHVHVDDYKSAEECAQKANVYVNVNGKHVTIFLDDI |
| | DPSVARKVEKCLRELNADVKVFV |
| 1358 | SEELEKLLKCVKEGDPECFKRVAEIIEELKKRDPEKAQLV |
| | EAALFLADNGILDPELIKFVVELVQ |
| 1359 | TVTIECVGVDPEAVEAIAAAFGAEVREKDGKLEIHLDDPH |
| | GAESAAAAISVLANVRCRLQE |
| 1360 | TIEELLEELRELGLIPPEVVELVKRVEKELAEKGDPRAME |
| | LLILVSDAVALNDPRAVEKLEELVR |
| 1361 | SEVERDLQFFIEAGVSPEAIHFLLANLLERTGDPRIEELL |
| | RLLAECLKRGIDPEECLEILLKFIK |
| 1362 | PRVIVIVDDPTVAELIVRRCNVKLVVRFGDQFLITLDDYQ |
| | CAQTVARELQPDVLILTSE |
| 1363 | SKLEEILEEARRRNDPEIVELLEFLLELAKENPSEAVFLA |
| | ENLLELYGDPLLELVVRVLEELVRR |
| 1364 | SDEDLELLAEWTGDPEQAIEALLFLADNRGDEKLVKILKK |
| | AVELLRRGEVSPEELIELIKELLRR |
| 1365 | DTEETLQTIVKELAKKAGVPSVEVDVVKGFIIVELKGTDE |
| | NAKKAFQLISKTCAELGYPCVVSTK |
| 1366 | SEIEEEAERAEEIKKLAGVPDVYVVVLNGRFFIQIQGDDE |
| | TAKEAEKIIDKYCRDNNLECVVFIE |
| 1367 | PKLEEVLRKLLEEDPNNDCLRELLFVLERLRRLGVDPHQI |
| | EINLEFLVAANHDPECERLLKEAIK |
| 1368 | DELLEHLRELVERLGDPEQVAEALLFLADNKGTAEELLKL |
| | LEELLRKTGDPEVKKILEIVERLLR |
| 1369 | TEDEKLAREILQLARDLNLDDVLVFVNRGVVFVLINGNDD |
| | RAKKLKKLAETIAKKQGIDILILEL |
| 1370 | GPEELRKELEELGDPKCVEVLEDALALLEQGVDPESVKQF |
| | VELLADQRGCSPELVRKIKKAVEEK |
| 1371 | SESEKIEKDVTDIARKAGVPDVDVELYNGEVVVVIKGDTE |
| | SAQRAETLILRWCREQGVECTILIS |
| 1372 | SEVERDLQFFIEAGVSPEAIHFLLANLLERTGDPRIEELL |
| | RLLAELLKRGIDPEEVLEILLKFIK |
| 1373 | SLEEALEIIEKELGDPELVHQLRINIEFLKELGVSPEEIL |
| | DLLRLILRQCNTPECRLALKILEET |
| 1374 | DEAERLKKELEDLGDPKCVEVLEDAIALLEQGVDPESVKQ |
| | FVELLADQRGCDPELVERIKEVVEK |
| 1375 | SEELEKLLKLVKEGDPEAFKRVAEIIEELKKRDPEKAQLV |
| | EAALFLADNGILDPELIKFVVELVQ |
| 1376 | SEKVQEIAKELRERGNPAAHQAAINFEFLLDLGIDPEDVE |
| | FLVCRALEEDLGDPEEAKRICKLLK |
| 1377 | SELDKIVKKLTDICREAYKHNDAETIARAYETAKRLAHTY |
| | DDPKFRELAIRCFRLDHEVDR |
| 1378 | GVIIVEITNEEAKKCVSIARKVPLVQVFTSNNKVYFIIVR |
| | DERALRLIEECLKRGNVNEVTRH |
| 1379 | DRELTELLLDFYSAVAFLKQVPDPNAQTLAKKLEEKFRTA |
| | LENDDDESLEKIVKEAERLANEQ |
| 1380 | SEYRTIDQLLARLALELGVGSFFVNCNDGRCTVFVLGNDE |
| | AAKIITEAAKKLSKTYGIPIEVVLF |
| 1381 | DCVLKILEELSKEDPRVREILELLERLAESHNLDPEDAVE |
| | ALLFLLDNRGDPRVELLRKALELCK |
| 1382 | SNREAAEVVHLARKAGDPKALELAEELLQCLNEGDKECID |
| | TLAKRIKKVIS |
| 1383 | DAHALLEIYSVLHFAKREGDEDLYKKVKSLLETAHKRAER |
| | ASSEEEEHRIFQDAAKKVEKLVR |
| 1384 | GLEDVKKVIREVLSPEEVEELERLIEKLRELGISPRDIIR |
| | AILAELFILGNPEAFRLVLEVLHKE |
| 1385 | PRKELAKELAKELITKAVKHQDPEAERDAKQACDVLADAA |
| | GLSDEWCKEVVKELKDKAKKS |
| 1386 | SELDKIVKKLTDIAREAYKANDAETIARAYETAKRLAHTY |
| | DDPKFRELAIRIFRLDHEVDR |
| 1387 | TIEELLEECRELGLCPPEVVELVKRVFKELAEKGDPRAME |
| | LLILVSDAVALNDPRAVEKLEELVR |
| 1388 | SEVEEVLEEVAKYVSPRLETEILLLVYSAKSAGLDPEEVV |
| | RLLERFLRKLGDEEAVRVVEELIRK |
| 1389 | SESEKIEKDVTDIARKAGVPDVDVFLYNGEVVVVIKGDTE |
| | SAQRAETLILRWAREQGVEVTILIS |
| 1390 | SEEFEKLVEELLRRGDLEKVKEVLKEAYEKLGDPRYHQAL |
| | INLEFLEDNLSPEDVAFLVLRQLKD |
| 1391 | QILIEVHVSDPNLAESCARAVNATLLELPGGTELIIVDTE |
| | ELSKIVSTCLKRLGAEVHVVG |
| 1392 | PELLEELLKLLEELGDPELLQTIRFLLECVRRGECSPESA |
| | LFLLLNEAQLLGNPIKEEIERLIRK |
| 1393 | DYEFQRLVLLLAQRAHECAEKNDEECLKKIESTAKKLKKE |
| | AQDPRIRRALQHVILAVQRLS |
| 1394 | GPEELRKELEELGDPKAVEVLEDALALLEQGVDPESVKQF |
| | VELLADQRGVSPELVRKIKKAVEEK |
| 1395 | SVQVVIKGEDDLHAFTVDSPEQARRIVTEWKKLYPDAKVF |
| | ETEHDNVLILEVHN |
| 1396 | SFRELSRKALEIANELGDREAERRVFRINQALVEGEAPEE |
| | WAEKALKRLIKKLK |
| 1397 | DACKIASQILLKHPDPREVRELLKELIKRLEENGNPEEAE |
| | LVKRLLELAKRDPREAQYLVEKCLY |
| 1398 | SNREAAEVVHLARKAGDPKALELAEELLQALNEGDKEKID |
| | TLAKRIKKVIS |
| 1399 | DTFIVSHDKREAEWCARAANVKEVIFELEGGEILIIVEGV |
| | SEEARELLDECFKILNQDNLIFVN |
| 1400 | TRILVIVHVEDPKKVEKCAKLAGVLLNTVGKSLLIVLNDN |
| | DPNRLEKCLRKVGAEFELIEF |
| 1401 | KILLIVFTEDEEALREVIELARRIHAVECIRIGDQALCEL |
| | GDDEEAKKFLEFTKNERVKVTELEL |
| 1402 | SEEEHTEFLLRLLRENPLEFEFYIAHLIDRTGDPRLEELL |
| | RLIREALKEGDPELLEKLVRLLLKT |
| 1403 | SEEEYKKKIKELLRRGDLDRAYELAVEAYHRLGDPRFLEI |
| | AAEIFVLDAKGISPEEIVEILERLE |
| 1404 | DEAKRRAEILKKEAEKLIKNGNRTEALLLLYSALSFAERK |
| | NDEKLYKLVETVKKEVESLANS |
| 1405 | TLVVICRVDNVEEVEKFARNADAKVYVNGKNVFVVLKSEE |
| | AAKKLTKWAKKMNAKECVVHKI |
| 1406 | SDEDLELCAEWTGDPEQCIEALLELADNRGDEKLVKILKK |
| | AVELLRRGEVSPEELIELIKELLER |
| 1407 | DEEFKEEAKELIKEGNPEEAVKVIEELAERLNDPELHQCA |
| | INLEFLLDAGEDPEDILFILELCLK |
| 1408 | SQSELVETLVKEVSELLEIPSLEVSCSNGSCTVTVKGNDS |
| | LAAAAAILIDNAALRVGVPVSVTER |
| 1409 | SNCERASEAIRVALKAAGVPSFSVTVDNNSVTVTVRGNDE |
| | AVREALQNALFIADHFGCPVSLRTQ |
| 1410 | DIEELFRECRKKGLSPEECLKLIAELLWRSGDPELKSVAA |
| | LLLLLLDNGVDPEEVLRDADFFLRL |
| 1411 | DEVEKLKKTVEQIAREAGIPDFDVFISDGQVFVLIKVHDE |
| | RATKATKRILKVCKKLGIECSIVLA |
| 1412 | SEEYIREVIKLEREKGDPEAAEFVEELLRSLKDLSPEEVL |
| | HQIAAYLVAKGDPELLRIIFEALEK |
| 1413 | DVREVLEELLERGEVSPRVVTEILLEVYSARHAGISPEII |
| | KELVVRSLERLGNPEVARLVEKLLR |
| 1414 | SIEERLEELCEKKNDPECREAVELFKLLVERTGNPEEVER |
| | QIEEAIEVTGDPDERLALEILREAK |
| 1415 | PVVLFLIDAPPEAARWLYELVGVKRVISYEDGLYILEVDD |
| | EEAARKACELVARLFPIKVVCLK |
| 1416 | PRVIISCGDHGIEEAYKLVKSANAKVILLGDVVEVENVDP |
| | REAEKVVRYLQSLGIPCFVFVLE |
| 1417 | SERFEELVRCAAKGDERCERVILFLIDLLKLRDEERAREV |
| | KKILELLKKDPDNEELLERLTRLLA |
| 1418 | PEEVLELLLEALERGDKDLLEEVKRLLEELAKTDPEVHQL |
| | LINAEFLEDAGFSPEDIVELLKIQL |
| 1419 | PRIVCIVRVNSPYAEKVAKIAKKLGVHVLQHGNDIFLLDA |
| | DEEVQRLVEEAKKYGVEVLCVEFE |
| 1420 | DLLQLLAHLLEIARRLGNEKALEVIDRAIKAWLEGDLETA |
| | KKLTKLARKLL |
| 1421 | TVTIEVVGVDPEAVEAIAAAFGAEVREKDGKLEIHLDDPH |
| | GAESAAAAISVLANVRVRLQE |
| 1422 | PEEVLELLLEALERGDKDLLEEVKRLLEELCKTDPEVCQL |
| | LINAEFLEDAGFSPEDIVELLKIQL |
| 1423 | TIQEEVERIIREAQEFVSKKGDEDIKRKVDHLAELAQRLL |
| | KAGDERYAKIVAEALRAILLKVKQ |
| 1424 | TELLRELFRRALERGDNSQVLIDIWEICRIVAGGDPELTK |
| | RCFERIVQLLERDPEKARELLEKLG |
| 1425 | DEEKKELKERIDKLLRYAIEVVDNPEERKLFTELAKKIKK |
| | LLEKNPTEALLEAYSLAHYARLK |
| 1426 | TEDEKLAEEILQLCRDLNLDDCLVFVNRGVVFVLINGNDD |
| | RAKKLKKLAETIAKKQGIDILILEL |
| 1427 | DLKEEIEKLLRECGVSPEEIEELKIFFEELLKRASPEQVL |
| | EALIFLLDNKGDPCAAKLLLELLRK |
| 1428 | SEDEEIERAIREAAKRHGLTDVDCKVRNGTITCKVGGDDK |
| | DARAVLDFAELLADALGVPVNLRTG |
| 1429 | SEEHSRFVEELLKDNPAAAVFYAVNAVQNLRRRNEEEARR |
| | VEEELRKLLERLDPRLKEAFEYTLR |
| 1430 | DEEKKELKERIDKLLRYAIEVCDNPEECKLFTELAKKIKK |
| | LLEKNPTEALLEAYSLAHYARLK |
| 1431 | SESEKIEKDVTDIARKAGVPDVDVFCYNGECVVVIKGDTE |
| | SAQRAETLILRWAREQGVEVTILIS |
| 1432 | SERFEELVREAAKGDERAERVILFLIDLLKLRDEERAREV |
| | KKILELLKKDPDNEELLERLTRLLA |
| 1433 | HLLVEVKDERVAREVAKLLNAPCIELHLPGDKYLFFCRGV |
| | SKEQAKRVAKTVHKKYKNVQLIVL |
| 1434 | SESEKIEKDVTDIARKCGVPDVDVFLYNGEVVVVIKGDTE |
| | SAQCAETLILRWAREQGVEVTILIS |
| 1435 | KKCLVFVQDVDDDVVKKLSEVANVPVVKLPGNIVIERVHD |
| | DELAERILKVAAEVGARVFINCHE |
| 1436 | NEAATEELKRLIKRLPNREEIEKLIKEVSELAGVPPEEVE |
| | RQVAQAVDFLGLPPEEVLRALLYQF |
| 1437 | DASRRVSTEALLNAYAAGVPHVRVEVKDGRVKVTLRGDTE |
| | AVRAATRAIKRLAEKQGVKVDLKVQ |
| 1438 | PFCAVDVEDEEAAKIIARELDGVLVTFSSGEALVYISGYD |
| | WKEVVKRAREIAKKLNVNVRIFCSE |
| 1439 | SVTELLLALYADLHYFGDPRVEEILRRVEELLHKGDPRTA |
| | IELVLRAAEELGNEHLKKLAEELLR |
| 1440 | DRSDLFALVLTALLRLGIPPEEVRRIAAEAFRLCGGDPEC |
| | IIKIVKEILEREDPELARLFEENVK |
| 1441 | SEEEVEILKEEVKRIAKKACENNDEKTLHSLEAFAEIILD |
| | SNNNEEAKEILEYIRKVITDCSK |
| 1442 | DEVEKLKKTVEQIAREAGIPDFDVFISDGQVFVLIKVHDE |
| | RATKATKRILKVAKKLGIEVSIVLA |
| 1443 | DRSDLFALVLTALLRLGIPPEEVRRIAAEAFRLAGGDPEL |
| | IIKIVKEILEREDPELARLFEENVK |
| 1444 | SLEETVKKVVKKVATEAGAEDVDVFIYDGYVLVLFKGSDE |
| | SAKLASELIHEILRRLGVEVTLLIL |
| 1445 | SLELLEEALRCLGDPAIEDVLFLVRELLESGDPYSALFLI |
| | ANLLERLEEKGNPDCVKIIRKALEV |
| 1446 | SVVVLIFGEDSTHYFVVDSPEQARRIVTEWKKLYPDCEVR |
| | EVEQNNQLILFVKC |
| 1447 | SEEEEDRALEEFIRRAADVPDVKVRCKDGTCTVTENGNDE |
| | AAHQARINLEFLSDILGLDVKVRVK |
| 1448 | DRSDLFALVLTALLREGIPPEEVRRIAAECFRLAGGDPEL |
| | IIKCVKEILEREDPELARLFEENVK |

TABLE 10
Tie2 binding polypeptides

| SEQ | |
|---|---|
| ID | |
| NO | Sequence |
| 1449 | PEEFVREALRRLIPDPRLQKIVEEALELAKRLGIDPFEVL |
| | QILDFLLIYLGDPEEAAKILEELVR |
| 1450 | SIVEELERLLEEAGVDPELIEKLSAVILQLLIRGLDPKDV |
| | LRFLLEMLERDGNPLRRVVEELLKR |
| 1451 | SIDEELERLLEEAGVDPELIDDLYAVIYQLYIRGLSDKDV |
| | ERELLENLERDGTPERRVVEELLKR |
| 1452 | SVEEFLKKLVEEFGVPPEEVERALEIIARLLNVPPEAALF |
| | FLIAIILDYNVPPEEAVEIVRRNVT |
| 1453 | DESAAEQIARLLIQGDPAAKQTVRAFVQAAKRGNPAAKRA |
| | LEVIRKVLRKLGNPEVVKKVKKLIK |
| 1454 | TEEIARRIVEALERGDEHLYFDLLQKLSLLVVRGDPVARE |
| | ILEVIREAIRRNDPDLLRELLKRLG |
| 1455 | DEERRHAEKLLRKGDLKTLKKLVKRLIKRVGDPNLKLQLL |
| | QVEMVEKFGDPHVALLLEVFIVKEG |

TABLE 11
TrkA binding polypeptides

| SEQ ID | |
|---|---|
| NO | Sequence |
| 1456 | RDELKERIFKTIVRAVVTGDPELLKEAKKLLEKLKKLGRL |
| | DQSAKQLEKAVREVEKQLRS |
| 1457 | RDEIKERIFKAVVRAIVTGNPEQLKEAKKLLEKLKKLGRL |
| | DQDAKKFEKAIRQVEKRLRS |
| 1458 | DEIEKRLRTALEELVRADKNNDEEKVRKAWQKAVQIVIEA |
| | NDDNVSKLASKIYRELAKRVKS |
| 1459 | SPEEELKKLEKIAKKKGDTRALSVIQVAKKAYKKGDEWTE |
| | RIALHIAKQLL |
| 1460 | DEIEKRLRTALEELVRAVKNNDEEKVRKAWEKVVQIVIEA |
| | NDDNVAKLASKLYKEIEKRVKS |
| 1461 | DEIEKRERTALEELVRAVKNNDEEKIRKAWQKVVQIIIEA |
| | NDDNVAKLASKLWREIEKRVKS |
| 1462 | DEIEKRLRTALEELVRASKNNDEEKARKAFLKVVQIVIEA |
| | NDPNVSRLASKLYKEIEKRVKS |
| 1463 | DWKDQASELLDKLIKKARSNRDDELAKEVLKLLLRARWAS |
| | HLSDDERAKKLLKKIVEEARKM |
| 1464 | SDEKLKRLEKIAKKKGAWKALVAIHLAKLASKRGDEKTLR |
| | SAEKLAEKILS |
| 1465 | DEEEKRILKKLKEVLRSLSSIPDPTAQKVVETAWKLAVEA |
| | VIKNDKELLKKVAEYAERILKKA |
| 1466 | DESLKLLRKADKGAREKQISEKELKKAVEEARRRGLEEVA |
| | RYLELLLWVLRLL |
| 1568 | RDEIKERIKKAVVRARVTGNPEQLKEAKKLLEKLKKNGRD |
| | DQDAKKFEKAIRQVEKRLRS |
| 1569 | RDEIKERIKKAVVRARVTGNPEQLKEAKKLLEKLKKNGRL |
| | DQDYKKFEKAIRQVEKRLRS |
| 1570 | RDEIKERIKKAVVRARVTGNPEQLKEAKKLLEKLKKNGRD |
| | DQDYKKFEKAIRQVEKRLRS |

TABLE 12
VirB8 binding polypeptides

| SEQ | |
|---|---|
| ID | |
| NO | Sequence |
| 1467 | NAEEILEKATLIAIEAWMLAKDEEVKKLVRTLARQVRKLL |
| | SNNDDDSAKSVLDTLKSVLEDLKS |
| 1468 | NAEEITEKATLVGIEAWLLAKDEEQKKKVRTLNRQVKKLL |
| | QQNDLDQAKRVLDQLKSVLEDLKS |
| 1469 | TERDLAFLIVSNVSPEQQEKFKKTLKKIADELRKRAKDRG |
| | LSVSIDVKQIRINGTDIVLIDVQVD |
| 1470 | DELEKLLRELGVPPEVIEELKRLYEELRKKGIPEEEVERI |
| | LFRILLERGDPALAAFTLVAVLLYI |
| 1471 | DELEKCLRELGVPPEVIEELKRLYEELRKKGIPEEEVERI |
| | LFRILLERGDPALACFTLVAVLLYI |
| 1472 | DEEILRKIEEIIKRIGNEDLERVERELKEALERGDEEEYK |
| | ALLVLLAILAYILGDPDVARLVRKL |
| 1473 | DLIERLIKIARELGDEEAVRLLEKALEALKRGDYETVLKL |
| | LREVYKLLGDPEVTVVAVLLYIEAI |
| 1474 | SVEECLERLKREGVLPPELLKRIEEAIELAKRIGDEEALR |
| | VLELACRLGNEYAILAVIYVIELEV |
| 1475 | SLEEKIEEAIRRNDPELVLELLKKLAELRNDPYLRRVARA |
| | LELAVRLGNPVLVYAELILVELLVK |
| 1476 | DEERLRRLGVPPEVVELLKRLYRELEKQGIPPEAIVAYLY |
| | VIAVELNDPELEKALRLLAKILLTE |
| 1477 | DLSERVLKAIALAVKLGNEVLFKAQIILASITLGVPPEEV |
| | LKLAKELAKRIGLLSPEELELLERL |
| 1478 | DLSERVLKAIALAVKLGNEVLFKAQIILCSITLGVPPEEC |
| | LKLAKELAKRIGLLSPEELELLERL |
| 1479 | DVTITIIVFINGEFTIYRIRVGPDPREKKEAQKLIDEIST |
| | KAKKLGGSVWVWRQDGTDRQEYHYK |
| 1480 | DVNVYAAAISVVLAKDPQALEALKELAKKLGDEELLRAVE |
| | LFEEALRRGDEELLRKASELLLRLA |
| 1481 | DISYVTVERSSPGNEDEYRKWKKKVEKVQKDLKKKAEELG |
| | LTIKVRSNRVRQGDSTFYFVFIWVE |
| 1482 | SDNKVELFIFVNGNPEQYKEAEKRLKKIAKKLTDEARKRG |
| | QRVSYSIRKTSRGNVVLVVLEVQTD |
| 1483 | PKEVAEILEECARKAGDEDVEELIKELKEAIKRGDEEEIR |
| | ALLVLLAILLYILGLPECAEVARKA |
| 1484 | DEEELIAEAAAVSAAFIPDEEVAEKVVEAAVRLCLKLGVS |
| | EEECREICERAGVDPRLCEKILRKL |
| 1485 | SYWIVVQSDDGGRLEFIIVEVDDDPEDLKRAEELARRIAK |
| | KLTSRGLRVQVWVLDGSKWSTIKIE |
| 1486 | DLEEIIRLLKKVAKELGDEEALRLAEKAEKALKDGDPDEV |
| | KALLVLIAILAYIKGNPELAEVARS |
| 1487 | DLEEELKELGDPHILALVLLSAAYVEGDEELVRVVKEILK |
| | LLESGKISEEEALELLERALKEIK |
| 1488 | DERCAELLERIAEKLGDEELKELVKELKRALKEGDEEEFR |
| | ALLVLIAILAYILGDPEAAEVARKC |
| 1489 | SVEIVVVVTYNGKTERYRLHVGDDPEERKKAEKFVKKVTK |
| | RAKELNARVWVAIFDGHEVDESAYQ |
| 1490 | DQRVTVFIFYNGDRKIETYRYGTDEEAEKKLKKLIKDWKR |
| | KARKLGGIVIIAVRNGDKIREWWVW |
| 1491 | DDIEWYIIVVDSRDSKSQQEARDKLETIASKISKKVKKNN |
| | GRVSYKIRTYSENNRIAFILEVKWG |
| 1492 | DEELLERAIKLLREGNPDEAAEVLRKLYKILAEKGTPAAA |
| | DISLALVLLYIGNPKLARKVLEKLK |
| 1493 | DEDDLDLRVTVLLLAWMAVLDNRPYTYSVNVNGYNLTVTE |
| | DTDPSQAQKAAEDEVKKYEQLKRN |
| 1494 | TEHQIWRIRVKGTDEEAQKKVEKAVKKVKDTAKEQARKQG |
| | KSVEVVVRQFHFGDTIFVIIVVSIG |
| 1495 | DEELLRTLKRLSPEAREIAEILERLLRNGIIPPEEAEELL |
| | RAVKTCLDRGNPLACEAQKLLVEVN |
| 1496 | TEELREVYKILREVDPEAAAAVTILLVLLYLDPDDEEVRK |
| | LAELITEAVRRGDPELIEKLAREIN |
| 1497 | DEEAVECLKKLIPDPEVRKLLEELLERAKRGDPEAKEILE |
| | LLRELCKLGNTEAVHTILAVLLYIK |
| 1498 | SEWDEVLWEENKDDPDQRKKAEKKVKDFEKKAREKAKRKN |
| | VPITVKRRSFTKDGTVFIVVEVEVG |
| 1499 | DIILEAALIALEITGSPEFLKAAKKYAEKLGDEELVRLIE |
| | KLLEALERGDEELYRELLELVKRLL |
| 1500 | DELSKELEELIKNGDLETVLKIAEELVRKVGDPRAEKVLE |
| | AIKEAIERRNPVLVYAAVALLLHLT |
| 1501 | SELAEKLLEALERGDRAALTLLLIKLYIELLKKEPPKEVK |
| | KIVRTVLELLKRDPEKAKELLEKLR |
| 1502 | SEVDFYLILLDGNDEDAQKTADRLVKEISKTATEEAKKNG |
| | GSVKIHVTKWHSGELLIVIVEVNID |
| 1503 | SIKISIWVLYNGRTERYEVSVGDSPEEQKKAKKEVKKIVD |
| | TARKLGAIVVVENRNGEDLEFHEDV |
| 1504 | SVDEVAERILRTGDPELVKKLEELLEELCKTDVLACAALL |
| | VLKVALELNDKDLVELVLRALKRIF |
| 1505 | NVCLALELGNDVNLYAALALLLVEAKAKNDEELLRKLEEV |
| | ERLAKEALEKGDEELLKEVCELYRK |
| 1506 | TEACLVLLAILAYIKGNPEVAELVRELAKLALEGKVPPEE |
| | LTKLLEKLLRELGDPEVLKLLKECL |
| 1507 | DDFEFYVEKIDVKDEEDKKKAEKYAKKVKKDIEKHEKDRG |
| | LDVKVKLWYDTLNGEFFFVVEVRSR |
| 1508 | SFEELARLIEKIARELGDEELEKVARLLKECLKKGDTVCL |
| | IALLALLYVKAYEKRDEEAKKAARS |
| 1509 | DKEEIYIVLLENVSEEDVKKAHETLKKTAEKLKREAEKRG |
| | QKFTESIKVVEWGDIWFILLTVHKG |
| 1510 | DQKVTVFIAYNGDRKIEKYRYGTDEEAEKKLKKLIKDWKR |
| | KARKLGGNVVIVVRNGDDERVWIVE |
| 1511 | DVERVEKAIKLAVEEGNELLVRVALYLLAAYLESLGNPEE |
| | AKRVKELLELLERGEVPPEEILKLL |
| 1512 | DEEAIRLIEEALRLNIDPHILELAVIAVLAVLSLQLGDPE |
| | KAKEIIKRLLEELGDEEAKKLLEKA |
| 1513 | SSVDFINVELQGASPEQVKKVEDEVRTWAKKVKKTWKKKG |
| | KDVKVSVWVDTVNGAYAIYVFVQVD |
| 1514 | DEHYVVIVSEKDVSPEQQKKAEKIVQDFTKHLTEKAKKRG |
| | LDVKYVRWSWEENGKTVVIVIVTVR |
| 1515 | DDFDIFLYNIDSTDPEQIKHARKLAEKFAKDVTDDAKKRG |
| | QRVKVSILQINWGNQVNFAVFVHIK |
| 1516 | SVTVYVWVNDNGQEDTITVTLGDDPSEQEKAKQVARDLNK |
| | RAKELNLEVAVWVDYGDRVELWLVE |
| 1517 | SERRIYFIYLDGNDEDAQKTADRLVKEISKTATEEAKKNG |
| | GSVKIDVTKWHFGATLLVLVRVNID |
| 1518 | PEVLVYVVVEDWRKVSEVARRLGAKVWTFGDVVFVAFENV |
| | PPEVAKKLAETLSKLAQVSVWVIG |
| 1519 | LTIRIWEWKYTNISPEQQKKVEKKIRELAKKLQKEAKERG |
| | QRVTVVVFRFESNNRVLELLISIER |
| 1520 | DKEELTELAKEAVKKGDFELLERLLEEARRRGDEEAVRLI |
| | LKLLAKVALELKDPEILALLAYLYV |
| 1521 | CEELVKELGAPPEVEKVCRLVEKLLRERGVPPEEIRVLLY |
| | ALAIILLLLLELGDEETVKRIRERL |
| 1522 | SRVWISVTDEKAARVISKLVNVKRVLKRGDFVFLSVDLDW |
| | RKAKSIAEKVSKELQVPIFVFWVP |
| 1523 | DEIEDLLEKAKEKGTEEEVERRLIEEAEKEGDELLVLVLR |
| | ALLEAVKLGNEVLTRAALILASVTR |
| 1524 | STVAIFVDDWKAAEEVAKVVNAEVEVTRKNGVYFIEVAIS |
| | DEDKARKVVELLKKVGVEVVIILP |
| 1525 | DELLEELLERCDTPVCRELLKLFRECKERGVPPEACVAYL |
| | YVFAVELNDPEVEKVLREAAKLVLS |
| 1526 | DIALLALAYVLAVEVGDPELEEFVRRLAECLLRGECPPEE |
| | VRRLLEEFIEAVERNDEELLKRLVS |
| 1527 | GWIFVIISDWKKAYKYAKSLGVKVEVWTWDNRRYAVVLKD |
| | VSEEVSRSLKEWASRVGAHFIVFF |
| 1528 | GEYDFILVDVRGDDPNKEKKARDTLKEFARTLEEKAKKRG |
| | LDVKYSLFEIQLKGDIFFVLEVHVD |
| 1529 | DEFEEKVTKIIRKVAKEARKKNRPLRVRVTVNGTTIDILV |
| | PPDPDLATTMAKLAIMYVKIRQDI |
| 1530 | SENEVVFWRENKDDPDQRKKAEKKVKDFEKKAREKAKRKN |
| | VPIDVKKISFTINGRVIIFVVVTVG |
| 1531 | GHLSLSTYEFQTSDPRDAHRLVKELKKELEKEAKDLRRKG |
| | LDVKIWVWVNQIGDSVVVWVEKRTE |
| 1532 | TEILVYAELILVEVAIEAGDEDLARLAVEALKRLGDPRAK |
| | EIARLLEECIKRKDPELCKEIIKKA |
| 1533 | PYCKEAAKVLLEAIEAGDEYATAAALYVLKLLCGDPEEVK |
| | KLLEEVAKELGVPPEVVELAKKLLE |
| 1534 | SEVDVVIWAFNKDDPDQRKKAEKKVKDFEKKAREKAKRKN |
| | VPITVHKSTFTVNGLVFISVIVEVG |
| 1535 | SDFREWKYSVEGTDEEAKKEIKKFVKTATTRAKKLAKELN |
| | RSVTIRYFIHSDDNSIDVIVVVVVQ |
| 1536 | DDIDFFIETIDVKDEEDKKKAEKYAKKVKKDIEKHFKDRG |
| | LDVKVTLYYDTLNGTFWFVVWVRSR |
| 1537 | SEEEVVSWTFNKDDPDQRKKAEKKVKDFEKKAREKAKRKN |
| | VPIFVWKQWFTKDGTVSIVVWVVVG |
| 1538 | AEIVRVRFKYDKSDSKSEKKAKDTAKKISDEVKKKAEKKG |
| | LPVSVWSNTLEKDGKVKFFLVVFVG |
| 1539 | DQKVVVWIFYNGDTKRETYRYGTDEEAEKKLKKLIKDWKR |
| | KARKLGGSVVIFVRNGDHVRVWIVE |
| 1540 | DEVIFLVTWEDGDDDRAKKVVKKIKKEATKLAQKLSKEYN |
| | LSYSVETKKRTENGQVVVQIALRVK |
| 1541 | SIVDFYIYREDARDPDQRRSAKEILTRVRKRLTKEAKKQG |
| | LDVKVTLFSRQDGTTLNVVVAVWVD |
| 1542 | DKVYLYWYVVKGTDEEAKKIADKERKDAKKHAKKYAQSVG |
| | GSVRVRVRYYESGDIIVLVVVVTVR |
| 1543 | SDIILYVYTETGPDAEEKARKTATKVVKKVATKLRKKVGV |
| | DKFKYLILVRKKDGTVLVVIFVRVE |
| 1544 | DEFYIYLYEVKGTDEEAKKIADKERKDAKKHAKKYAQSVG |
| | GSVRVTVRYREDGDAIFLVVEVTVR |
| 1545 | SEELIETIKELLKRVPDPRVRELARKALKLAEELGDPELL |
| | KLLKTCLDRGNPLCVEAQALLIEVN |
| 1546 | PLEERAEEAIIKALKLGNPVNIHAQLALIAVALGVPPEEV |
| | LKLVLKKAKERGLLSPEELKLLKEL |
| 1547 | DVLFLVAVENNGSAEWFRVRVGPDPSEKKKAKKLVKEFVE |
| | RARRKGALVVVQTIDGDKQEHQFYK |
| 1548 | DVFAVYIYTVKGTDEEAKKIADKLRKDAKKHAKKYAQSVG |
| | GSVRVRVWFREDGDTILLVVLVRVR |
| 1559 | DQIVVVVIIYNGDVEVEYYRYGTDEEAEKKLKKLIKDWKR |
| | KARKLGGSVTIFVINGDKSRRWHVQ |
| 1549 | DWQAVWIYFVDGTDEEAKKIADKLRKDAKKHAKKYAQSVG |
| | GSVRVRVRFLEFGDIIVLYVEVTVR |
| 1550 | DVEEAERLAKELGDPDILEALKELKERLKKGDPEAEEIIK |
| | LLSELLKEGNKEAVHTIVAVLLYIK |
| 1551 | DLVEELAKLALELGDLELIALVAHLYVAILAGDPELLKEL |
| | LKELKEVARKLGDPRIERLVRLIEE |
| 1552 | DELCKVVLELLERGVSPEEVKEIAKELGFSEEQVEVLLTV |
| | EAVLKYLGVPPEEIEEACKLLIKLE |
| 1553 | DIQWIDVAFVDGTDEEAKKIADKLRKDAKKHAKKYAQSVG |
| | GSVRVRVHWREWGNLIALFVEVTVR |
| 1554 | SELEEELKRLLCEGDPKKVEKLIRELAKRLGRPPRAVLRK |
| | LYKELARRGDPCAAALTVLAVRLYV |
| 1555 | DQKVSVSIVYNGDLKIEHYRYGTDEEAEKKLKKLIKDWKR |
| | KARKLGGFVVIIVHNGDEVRIWLVE |
| 1556 | DKEEELIKELVRLIEKAGNPHAALALLYVKVLRRNDPELA |
| | RLLKKIAKKITKDPREVEELRELAR |
| 1557 | ADWRWWIIIIDTTDPKQQKKVEDKARKLAKKIKKDAERSG |
| | LDVKVQVRSWTANGRFTVVVQSAVQ |
| 1558 | GDIDVVTIIVDSTDPDSQKKAEDTLKKISKKAEKKARKLG |
| | KSVSYKINSDTENGLYVVQIWVEVE |

[0024] A number of the polypeptides were subjected to site-saturation mutagenesis (SSM), as described in the examples, to demonstrate the ability to make significant changes to the primary amino acid sequence while maintaining activity of the polypeptide. In one embodiment, substitutions relative to the reference polypeptide are selected from the residues listed as “best” or “tolerable” at each position immediately below the reference polypeptide listed in Tables 13A-13HHH.

[0025] In this embodiment, for example, where the reference polypeptide is Cd3_mb1 (SEQ ID NO: 759), residue 1 may be N, K, or V; residue 2 may be E, R, K, Q, H, S, W, V, T, M, A, I, Y, F, C and so forth.

[0026] In another embodiment, the substitutions relative to the reference polypeptide are selected from the residues listed as “best” ˜ at each position immediately below the reference polypeptide in Table 13. In this embodiment, for example, where the reference polypeptide is Cd3_mb1 (SEQ ID NO: 759), residue 1 may be N or K; residue 2 may be E, R, or K; and so forth, as detailed in Tables 13A-13HHH.

[0027] In another embodiment, 1, 2, 3, 4, 5, 6, 7, 8, 9, 10, 11, 12, 13, 14, 15, or all interface residues are as defined in the reference polypeptide in Tables 13A-13HHH (i.e.: position is denoted with an “X” in the “at interface” column). In this embodiment, for example, where the reference polypeptide is Cd3_mb1 (SEQ ID NO:759), residues 2, 4, 6, 26, 28, 30, 34, 36, 38, 40, 57, 59, and 61 are interface residues, as detailed in Table 13A.

[0028] In a further embodiment, protein core residues (core residue positions denoted with an “X” in the “protein core” column in Tables 13A-13HHH) are substituted relative to the reference polypeptide only with conservative amino acid substitutions. In this embodiment, for example, where the reference polypeptide is Cd3_mb1 (SEQ ID NO:759), residues 3, 5, 7, 12, 16, 20, 22, 25, 37, 39, 42, 47, 50, 54, 56, and 58 are core residues, as detailed in Table 13A.

[0029] In one embodiment, insertion of amino acid residues relative to the reference polypeptide occurs at a residue indicated in the column “loop/insertion” (i.e.: residues denoted with an “X” in the “loop/insertion” column of Tables 13A-13HHH). In this embodiment, for example, where the reference polypeptide is Cd3 mb1 (SEQ ID NO:759), residues 8, 9, 20-23, 31-33, 41-43, and 55-56 are loop/insertion residues, as detailed in Table 13A.

[0030] The polypeptides may incorporate any insertion relative to the reference polypeptide (i.e.: additional amino acids inserted into the sequence). In one embodiment, the insertions are made at loop regions in the polypeptides, as noted in the column “loop/insertion”). The insertion may be a single amino acid, a large functional domain, or any other amino acid insertion as suitable for an intended purpose.

[0031] Tables 13-A-13HHH provide details on interface, core, and loop residues and “best” and “tolerable” amino acid substitutions relative to specific binding proteins shown in Tables 1-12.

TABLE 13A

| | | | | | |
|---|---|---|---|---|---|
| | | | at_ | pro- | loop/ |
| posi- | | | inter- | tein_ | inser- |
| tion | best | tolerable | face | core | tion |

CD3d_mb1
NHIACEIHNPEAAKEIAKVANVRRVYFIKQPGNRYFVLLKNADPEGVKKVRSKYNVRCVIRE
(SEQ ID NO: 759)

| | | | | | |
|---|---|---|---|---|---|
| 1 | N, K | V | | | |
| 2 | E, R, K | Q, H, S, W, V, T, M, | | | |
| | | A, I, Y, F, C | X | | |
| 3 | I, F, V, Y | T, G, E, K | | X | |
| 4 | E, Q, M, V | A, K, F, I, G, T, L, | | | |
| | | R, N, S | X | | |
| 5 | C, P, M | G, K, R, D, I, Q, N | | X | |
| 6 | K, R, W, D, M | L, Y, I, E, S, H, A, F | X | | |
| | | , V, Q, G, T, C, N, P | | | |
| 7 | T, I, A, L | V, S, K, W, D, F, N, Q | | X | |
| 8 | H, Q, T, P, L, N, R | A, Y, W, G, K, M, F, | | | X |
| | | V, C, E, I | | | |
| 9 | S, N, Y, T, R | F, M, I, V, C, L, Q, | | | X |
| | | K, G, W, A, P | | | |
| 10 | K | M, L, I, F, R, W, P, V, | | | |
| | | Y, G, S, A, E, T, D, Q | | | |
| 11 | R, K | H, W, Y, S, F, Q, L, E, T, | | | |
| | | A, V, I, G, M, N, C | | | |
| 12 | A, M, T, L | V, G, C, R, Y, Q, I, H, F, N | | X | |
| 13 | R, L, I | V, A, F, M, W, C, S, D | | | |
| 14 | N | K, M, I, V, A, R, L, C, | | | |
| | | W, F, Y, Q, H, T, G | | | |
| 15 | K, R, F | H, E, M, Y, A, G, Q, W, | | | |
| | | L, I, S, V, N, T | | | |
| 16 | W, Y, L, F | I, C, V, D, M, S, R, P | | X | |
| 17 | F, I, A, R, | C, L, D, G, V, K, S, H, P, T | | | |
| | W, M, Y, N | | | | |
| 18 | K, S, G, V | T, R, C, I, W, A, F, L, E, H | | | |
| 19 | L, A, T, G | V, K, H, R, C, I, S, F, N | | | |
| 20 | G, Y, A | K, F, Q, R, N, S, L, E, P, | | X | X |
| | | T, H, D W, V | | | |
| 21 | P, H, A, W, L | N, R, C, S, K, V, T, F, | | | X |
| | | M, Y, Q, G, D | | | |
| 22 | R, Y, K, V, A, | N, G, W, P, C, F, D, L, I | | X | X |
| | S, E, H | | | | |
| 23 | Q | R, W, Y, C, L, F, N, V, P | | | X |
| 24 | N, P, D, C, E | R, V, Y, L, W, I, M, F, K, S | | | |
| 25 | V, T, S, A | L, C, H, K, M, R, F | | X | |
| 26 | Q, A | F, I, K, G, L, R, Y | X | | |
| 27 | F, I, H | R, V, Y, W, M, Q, L, S, K, N | | | |
| 28 | I, T, P, Y | R, M, W, L | X | | |
| 29 | I, K, L, T, M, V, | F, Y, A, G | | | |
| | C, W, P, S, R | | | | |
| 30 | S, K, R, Y, Q | W, A, I, L, P, M, V, | X | | |
| | | T, F, C, H | | | |
| 31 | L, P, Y, K | V, H, W, R, N, Q, M, F, T | | | X |
| 32 | G, R, V, C, E, D, E | W, S | | | |
| 33 | S, K | N, R, W, H, M, Y, F, | | | X |
| | | C, V, L, A, P, T | | | |
| 34 | R, S, T, Q, M, | H, P, K, I | X | | |
| 35 | Y, Q | L, F, I, K, C, R, S, W, A, V | | | |
| 36 | I, V | F, L, S, Q | X | | |
| 37 | V, C, M | F, Y, I, L, N, P | | X | |
| 38 | L, F, E, I | Y, T, M | X | | |
| 39 | L, V, F, W, T | C, A, M, G, D | | X | |
| 40 | K, G, E, V | R, N, I | X | | |
| 41 | N, D | T, L, G, K, R, S, C, A, | | | X |
| | | H, E, W, Y, P, V | | | |
| 42 | A, Q | G, P, D, K, C | | X | X |
| 43 | D, N, Y, Q | A, R, W, C, S, L | | | X |
| 44 | W, P, V, K | T, A, L, H, I, Y, Q, | | | |
| | | S, E, R, M, N, F | | | |
| 45 | E, K, Y, H, R, W, T | Q, M, I, F, A, V, N, G, C, L | | | |
| 46 | R, F, K, G, M, I, Y | H, P, A, W, S, C, D, L | | | |
| 47 | V, R, N, Y | P, L, I, T, A, D | | X | |
| 48 | M, F | K, I, Q, L, C, R, W, | | | |
| | | H, T, S, A, V, N | | | |
| 49 | H, Y, K, F, E | G, N, S, C, P, M, | | | |
| | | V, D, T, L, I | | | |
| 50 | V, Y, K, G, | R, W, C, E, S, A | | X | |
| | N, T, Q | | | | |
| 51 | E | A, V, P, Y, I, S, C, R | | | |
| 52 | N, G | M, S, F, R, Y, I, H, W, | | | |
| | | K, V, C, P, A, L, D | | | |
| 53 | V, K, R, M | F, Q, Y, W, T, C, D, A | | | |
| 54 | Y, W, V, R, C | L, A, H, G, I, F, S, T | | X | |
| 55 | K, N, G | Q, W, R, A, C, Y, H, T, P, | | | X |
| | | D, V, E, F, I, S, M | | | |
| 56 | V, A, M, K, S | I, F, E, L, W, Y, P, C, R, N | | X | X |
| 57 | R, F, N, K, V, H, L, | W, M, C, A, | X | | |
| 58 | C, F | N, E, Y, W, P, I | | | |
| 59 | H, V | Q, W, C, L, T, K, F | X | | |
| 60 | Q | I, F, E, P, R, K | | | |
| 61 | M, R, K | C, H, D | X | | |
| 62 | Y, E, S, R, C, I, K | F, M, L, T, V, H, | | | |
| | | W, G, N, Q, D, P | | | |

TABLE 13B
EGFR_mb1
SDELFSKVELKVTELSMIVMNAKTEDEKKTALTKIKQIADKVQDEELSKFVKRALEHVKKEVG
(SEQ ID NO: 2)

| | | | | | |
|---|---|---|---|---|---|
| 1 | N, A, S, P, D | R, Q, T, E, H, M | | | |
| 2 | D | S, K | X | | |
| 3 | E | A, S, Y | | | |
| 4 | E, L, M | I, Q, Y, C | | | |
| 5 | F,W | L, T | X | | |
| 6 | H, L, V, Y | S, M, I, T, F | X | | |
| 7 | Q, E, D, A, K | S, R, T, N, H, F, M | | | |
| 8 | V | T | | X | |
| 9 | Y | F | X | | |
| 10 | L, I | V, A | X | | |
| 11 | E, Q | D, T, K, R, C, H, Y, A, V, M, S, W | | | |
| 12 | V | T, I | X | | |
| 13 | T, K | G | X | | |
| 14 | R, E | D, N, A | | | |
| 15 | L | F, W | | X | |
| 16 | S, T | C, M | | | |
| 17 | R, F, Q, L, M | Y, I, K, C | X | | |
| 18 | E, Q, I | V, T, A, M, N, K, D, L | | | |
| 19 | A, V | L, W, M | | X | |
| 20 | R, K, M | L, T, V, I, H, E | X | | |
| 21 | Y, S, F, H, A, N, T | G, Q, R, M, V, I, W | X | | X |
| 22 | G, A | S, H, P | | X | X |
| 23 | P, R, K | H, A, Q, S, N, G, Y, E | | | X |
| 24 | N, S, T, D | K, A, Q, C, G, I, F | | | X |
| 25 | A, E, W, M, D, Q | C, V, T, L, H, N, I, F, K, R, S | | | |
| 26 | N, E, Q, A, D, V, S, I, T, | W, P, Y, C, F | | | |
| | H, K, M, R, L, G | | | | |
| 27 | E | K, A, L, D, Q, R | | | |
| 28 | R, K | Q, A, S | | | |
| 29 | M, Q, N, E, W, L, T, D, C, | G | | | |
| | I, V, F, A, R, K, H, S, Y | | | | |
| 30 | D, W, S, E, M, Q, A, I, G, | H, V, R, L, Y, F | | | |
| | N, T, C, K | | | | |
| 31 | A | D | | X | |
| 32 | L | M, F | | | |
| 33 | Y, Q, D, A, S, C, E, L, N, | I, V | | | |
| | G, F, W, H, M, R, T, K | | | | |
| 34 | A, Q, E, S, K, H, D | R, C, N, G, T, L, M | | | |
| 35 | M, I | L | | X | |
| 36 | Q, E, A, K, S | G, N, T, R, C, V, I | | | |
| 37 | M, E, D, A, Q, N, Y | I, C, R, H, L, S, F, V | | | |
| 38 | I | T | | X | |
| 39 | A, G | S | | | |
| 40 | D, E | C, A, G, L, F, R | | | |
| 41 | G, A, Q, D, H, T, S, E, N, | F, M | | | |
| | W, C, R, K, Y | | | | |
| 42 | V | I, C | | X | X |
| 43 | E, T, Q, Y | D, V, H, S, I, M, R, P, W, C | | | X |
| 44 | D | Q, G | | | X |
| 45 | P, E | D, T, V, K, S, C, I | | | |
| 46 | E | D | | | |
| 47 | V, I, T | L, C | | | |
| 48 | L, E, A, R, Q, K, Y, V, I, S | G, M, T, W | | | |
| 49 | D, E, Y, I, V, S, A, T, L, | K, R, H, C, G | | | |
| | Q, N, M, F,W | | | | |
| 50 | F | | X | | |
| 51 | Q, V | | | | X |
| 52 | E, I, N, R, Q, L, T, H, M, | G, S | | | |
| | F, W, Y, V, K, C, A | | | | |
| 53 | N, V, T, K, A, G, Q, L, D, | | X | | |
| | S, H, I, R, M | | | | |
| 54 | A | H, V | X | | |
| 55 | Y, L | W, F, M | | | |
| 56 | E | A, D, Y, K, H, W | | | |
| 57 | H | N | X | | |
| 58 | I, V | A, L | | X | |
| 59 | W, Q, T, I, L, M, V, C, E, | A | | | |
| | K, Y, S, R | | | | |
| 60 | A, K, N, M, S, Q | H, L, G, R, I, D, W | | | |
| 61 | K, R, M, Q, S, I, T, H, V, | A, Y, C, W | | | |
| | N, E, L | | | | |
| 62 | L, M, A, S, I, V | T, Y, H, F, W, R, K, G | | X | |
| 63 | F, W, E, Y, S, M, G, N, A | R, Q, K, D, L, I, C, V, P, T, H | | | |

TABLE 13C
EGFR_mb2
SLDEAKKLLQEAEKLARKINDRMELAYVEFLKHILETAKKQNDKRTIESVRDMARDALEELQS
SEQ ID NO: 142

| | | | | | |
|---|---|---|---|---|---|
| 1 | K, G, M, W, T, R, N, Y, A, I, C, V, S, F, P, E,H, Q, D, L | | | | |
| 2 | E, M, K, T, N, F, R, L, W, H, C, Y, G, D, P, I, S, A, Q, V | | | | |
| 3 | N, F, V, H, E, M, R, G, K, W, Y, A, L, T, T, C, D, Q, S, I, P | | | | |
| 4 | M, S, T, V, I, Q, A, D, G, C, E, L, P, N, Y, H, K, F, R | | | | |
| 5 | V, A, T, C, I, P, G, S | E | | X | |
| 6 | E, R, L, T, C, Y, G, F, K, H, D, M, N, I, V, Q, S, A, W, P | | | | |
| 7 | D, C, G, W, L, F, T, I, R, S, K, Q, H, Y, A, N, M, E | | | | |
| 8 | Y, F, M, I, L, W, V, D, T | C, A, H | | X | |
| 9 | L, I | | | X | |
| 10 | Y, N, G, F, H, T, S, R, V, D, A, M, Q, K, C, I, L, W, E | | | | |
| 11 | G | N | | | |
| 12 | Y, C, A | L, S, F, V | | X | |
| 13 | E, Y, A, D, G | H, Q, S, T, W, F, M, L, K | | | |
| 14 | H, W, E, C, S, T, G, R, Q, I, V, N, M, Y, K, F, A, D, L | | | | |
| 15 | M, E, I, L, W, Y, V, F, A, Q | C, H | | X | |
| 16 | A | | | X | |
| 17 | W, M, L, Q, V, A, I, R, K, F, H, T, C, Y, G, S, E, N | | | | |
| 18 | C, Y, L, E, D, T, M, W, R, I, V, N, A, H, Q, F, K, S, G | | | | |
| 19 | L, T, M, I, G, Y, F, F, W, V, C, Q, A, S, R, E | N, H, D | | | X |
| 20 | H, A, D, M, G, S, C, K, N, E, Q, R, T, F, P, Y | V, L, I | | | X |
| 21 | D | N, S, E, Q | | | X |
| 22 | T, P, Q, K, A, R, S, N, G, D, H, I, E, L, C | M, V | X | | |
| 23 | T, H, L, M, I | F | X | | |
| 24 | E | | X | | |
| 25 | I | V, M, T, L, C, Q, E, S, Y, | | | |
| | | W, A, F, F | | | |
| 26 | G, A, K, M | S | X | | |
| 27 | Y | | X | | |
| 28 | C, I, V, F, D, A | L | | X | |
| 29 | E, H, D, N, T, K, M, V | A, F, Q, S, R, G, I, L, | X | | |
| | | W, Y | | | |
| 30 | L, F, M | | X | | |
| 31 | L | | | X | |
| 32 | D, A, G, R, F, S, Y, W, Q, M, E, T, N, V, K, C, H, I | L | | | |
| 33 | S, E, G, A, Y, N, Q, H, D, T, W, M | V, R | X | | |
| 34 | Y, L, N, E, I, S, M | Q, W, A, V, D, F, H, T, C, | X | | |
| | | G, R | | | |
| 35 | F, Y, L, W | H | | X | |
| 36 | M, A, D, S, Q, N, F, C, E, K, H, Y, V, T, L, W, I | R, G | | | |
| 37 | D, Q, E, N, S, T | G, H | X | | |
| 38 | A, S, G | T | | X | |
| 39 | E, L, M, I, V, C, N, Q, T | A, Y, F, W, S, R, K, H, | | | |
| | | D, G | | | |
| 40 | W, H, Y, V, I, F, K, E, M, C, G, T, S, L, R, N, D, Q, A | | X | | |
| 41 | E, D, T, Q, Y, G, A, S, M | N, I, V, W, H, C, F, L, R | X | | X |
| 42 | Q, S, E, G, N, D, A, C, K, H | R, V, M, T | | | X |
| 43 | Y, D | | X | | X |
| 44 | E, D, H, A, T, V, I | S, L, M, Q, P, R, C, W, K, | | | |
| | | G, F, N, Y | | | |
| 45 | E, D, A, Q | N, S, V, P, G, M, H, T, K, | X | | |
| | | I, W, R, Y, L, F | | | |
| 46 | E, G, Q | S, A, D, T, W, Y, N | X | | |
| 47 | G, M, I, F, A, E, Q, C, Y, W, L, V, T | S, N | | | |
| 48 | D, E | Q, M, A, C, I, V | | | |
| 49 | E, D, Q | V, I, N, H, T, S, M, G, R, | X | | |
| | | A | | | |
| 50 | T, A, C, V, I | | X | | |
| 51 | T, V, Y, L, W | K, S, H, Q, G, F, M, N, E, | | | |
| | | R, A, I, C | | | |
| 52 | D, E | Q, A | | | |
| 53 | M, L | | X | | |
| 54 | A | S | | X | |
| 55 | W, H, V, L, C, M, S, I, E, A, Q, T, R, F, Y,, K, N, G | | | | |
| 56 | D | | X | | |
| 57 | E, N | A, Q, C, H, S, D, T | | X | |
| 58 | L, V, I, Y | F, C, W | | | |
| 59 | Q, L, T, W, H, V, C, Y, S, I, A, F, E, D, M, N, G, R, K | | | | |
| 60 | F | Y, A, D, S, E, C, V, H, W, | | | |
| | | Q | | | |
| 61 | L | | | X | |
| 62 | C, E, S, L, A, R, M, Q, K, H, T, V, Y, N, I, G | W, F | | | |
| 63 | Q, C, Y, D, V, F, I, W, E, T, G, K, H, N, M, S, L, A, R, P | | | | |

TABLE 13D
EGFR_mb3
SLEEVKELIRKLVPDPRLVWALEDLLELLKKGDPLAEEVLRFYLASAREQGDKDLTKAIELVLKT
(SEQ ID NO: 4)

| | | | | | |
|---|---|---|---|---|---|
| 1 | T, D, P, Q, H, S, R, N, V | G, I, A, L, C, K, Y | | | |
| 2 | M, D, V, T, I, L, A, H, Q, P, N, S, G, W | Y, F, E, R, K | | | |
| 3 | T, E, S, N, H, V, M, P, K, W, F, L, A | G, R, D, I | | | |
| 4 | S, C | D, N, E, P, T, K, Q, H, F, G, A, I, Y, L, | | | |
| | | V, W | | | |
| 5 | M, L, V, C, T, G | I, Q, S, A, E, P, Y W, N, R | | X | |
| 6 | R, T, K, Q | S, L, P, V, A, G, H, I | | | |
| 7 | C, V, D, S, E | N, Y, T, I, Q, H, K, R, A, L,P W, F,M | | | |
| 8 | C, A, M, I, S, F, K, V, Q, N, W, T, R, H | L, Y, G, D, E | | | |
| 9 | V, I | M | | X | |
| 10 | H, R, K | S, Y, E, N, I, W, Q | | | |
| 11 | C, A, F, I, E, L, Y, D, Q, K | W, H, R, G, S, M, N, V, T | | | |
| 12 | W, L | M, I, F, Y | | X | |
| 13 | V | I, C, R | | X | X |
| 14 | P, Q, D, L, N, A, T | F, M, S, K, H, I | | | X |
| 15 | D, E | H, F | | | X |
| 16 | E, A, D, K, P | S, G, T, Q | | | |
| 17 | N, Y, M, I, T, L, G, S, Q, V, A, H | P, F, K, R, D, W | X | | |
| 18 | M, V, F, L | Y, P, N | X | | |
| 19 | L, I, S, C | V, N, Q, W, R, A, Y, F, T H | | | |
| 20 | W, H | | X | | |
| 21 | T, A, W | I, L, N, V | X | | |
| 22 | I | L, V, P | X | | |
| 23 | E | C, I, V, T, L | | | |
| 24 | D | | X | | |
| 25 | M, L | | X | | |
| 26 | W, Y, G, A, M, F | S, L, Q, H, C, V, T, I | | X | |
| 27 | M, R, D, C, S, E, A, Q, H, K, G, T, N | Y, I, L, F, V | | | |
| 28 | E, H, Y, F, I | L, C, Q, P, W | X | | |
| 29 | Y, W, M, H, F | L, S, C, N, Q, R, T, K | | X | |
| 30 | Y, W, C, M, V, N, S, L, R, D, H, I, A, E, | Q, T, K, F | | | |
| | G | | | | |
| 31 | G, C, A, N, D, L, E, Q, Y | S, M, T, K, F, H, V, I, R, W | | | X |
| 32 | G, A, Y | E, R, Q, C, S | | | X |
| 33 | E | D, N, A | | | X |
| 34 | E, M, P | C, D, V, N, Q, L, A, T, G, S, H, R, F, K | | | |
| 35 | V, D, L, I | H | X | | |
| 36 | A | L | X | | |
| 37 | D, E | N | | | |
| 38 | E | | X | | |
| 39 | V | | X | | |
| 40 | L | F | | X | |
| 41 | F, C, H, E, Q, M, N, Y, W | G, R, L, D, I, A, V | X | | |
| 42 | Y, W | F | X | | |
| 43 | H | Y, F | X | | |
| 44 | W, L | E, Y, H, M | | | |
| 45 | M, N, L | A, R, Q, Y, S, T, K, D | X | | |
| 46 | T | L, S, C, G, I, Q | X | | |
| 47 | A, S | G | | X | |
| 48 | V, I, R, M, Q | K, E, H, L, F, Y, A | | | |
| 49 | Q, W, D, E | V, M, I, S, Y, A, L, G | X | | |
| 50 | Q | G | X | | |
| 51 | K, R, G, H | S, A, C, F | | | X |
| 52 | E | D, C, I | | | X |
| 53 | W, C, M, I, T, V, F, A, H, Q, K, R, D, E, | P, Y | | | |
| | N, G, S | | | | |
| 54 | D, P, E, N, L, Q | H, G, T, F, W, C | | | |
| 55 | Y, A | L, F, W, M, T, V, S | | | |
| 56 | E, A, G, Q, F, C, Y, V, T, H, S, M | D, R, W, I | | | |
| 57 | M, T, I, Q, V, L, K, Y | S, H, C, E, W, R, F, A, N, D | | | |
| 58 | A | C | | X | |
| 59 | C, V, I | L | | X | |
| 60 | Q, E, S, I, L, C, V, M, N | T, D, G | | | |
| 61 | E, I, F, M, H, A, Y, L, V | C, S, K, Q | | X | |
| 62 | M, I, C, V | A, T, L, S, Q | | | X |
| 63 | L | I | | | |
| 64 | M, C, A, G, Q, D, Y, K, T, N, L, S, I, F | E, V, W, H, R | | | |
| 65 | W, H, Y, F, C, I, L, Q, D, T, M, V, N, A | R, G, E, P, S | | | X |

TABLE 13E
EGFR mb4
DDESLKLLLILVQIQLALERGEISNDQAKELAKRVEEKARKLGDEQVQRNVENVKEVIERFG
(SEQ ID NO: 5)

| | | | | | |
|---|---|---|---|---|---|
| 1 | Q, G, A, H, N, S, T, L, D, P, E, F, | K, V, W | X | | |
| | I, M, Y | | | | |
| 2 | E, D, G, S, Q | H,N | X | | |
| 3 | A, Y, P, Q, E, D, K, I, V, T, H, L, | W, G | | | |
| | M, N, F, S, R | | | | |
| 4 | T, N, M, P, A, Q, S, D, R, V, I, E | K, G, C, H | | | |
| 5 | M, F, L | I, W | X | | |
| 6 | D, G, A, K, S, H, V, R, E, T, I, Q, | F, W, P | | | |
| | N, M, L, Y | | | | |
| 7 | Q, L, M, F, V | C | | X | |
| 8 | H,C, L, M | | X | | |
| 9 | W | Q, H, I, Y, F, L, M, R, V | X | | |
| 10 | S, G, W, H, Q, R, T, D, I, A, M, C, | | K | | |
| | L, E, N, Y, V, F, K | | | | |
| 11 | L, I | | | X | |
| 12 | V, M, G | I, P | X | | |
| 13 | R, N, H, Q, W, E, A, D, S, T, K, Y, | F | X | | |
| | G | | | | |
| 14 | V, M, I, L | C | | X | |
| 15 | K, Q | | X | | |
| 16 | Y, V, L, H, Q | M, R, T, W, K, I | X | | |
| 17 | E, G, Y, T, H, D, A, L, M, C, R, N, | V, P | | | |
| | K, Q, S, F | | | | |
| 18 | M, L, W, Q | F, I | | X | |
| 19 | D, G, R, E, S, N, Q, K, T, A, H, P | M | X | | |
| 20 | A, D, N, S, H, G, R, E, K, C, T, V, | W, M | X | | |
| | Q, Y, F, L, I, P | | | | |
| 21 | H, N, E, S, A, F, K, G, Q, M, D, Y, | W | | | X |
| | R, C, L, T | | | | |
| 22 | Q, T, D, S, E, N, R, H, A,V, L | K, C | X | | X |
| 23 | I, V, L, C | M | | | X |
| 24 | R, G, K, T, N, S, E, M, D, F, A, C, | Y | | | X |
| | H, Q, V, L, I | | | | |
| 25 | T, F, L, K, D, C, N, Q, M, Y, A, E, | | | | |
| | I, G, P, S, R, V, H | | | | |
| 26 | I, W, F, P, S, L, N, R, A, T, G, D, | | | | |
| | Q, E, K, H, C, V, M, Y | | | | |
| 27 | W, G, T, S, N, F, K, M, L, V, Y, C, | | | | |
| | D, Q, R, I, H, E, A | | | | |
| 28 | A, G | E | | X | |
| 29 | W, C, I, A, Q, V, R, Y, N, S, T, L, | D | | | |
| | K, H, F, G, M, E, P | | | | |
| 30 | S, W, G, Q, T, N, F, H, L, V, E, I, | | | | |
| | M, D, C, K, A, Y, R | | | | |
| 31 | W, T, D, F, H, R, L, E, I, Q, N, V, | | | | |
| | M, K, C, A, Y, G, S | | | | |
| 32 | T, N, A, V, L, C, S, P, E, K, G | I | | X | |
| 33 | R, G, F, D, W, H, S, I, L, V, M, K, | | | | |
| | Q, E, A, Y, C, N, T | | | | |
| 34 | V, K, W, F, Y, T, N, I, L, R, A, S, | P | | | |
| | Q, M, D, E, H, G, C | | | | |
| 35 | I, V | M, C | | X | |
| 36 | E, D, G, S, A, Q | N | | | |
| 37 | F, D, R, T, M, Y, V, Q, W, S, A, E, | | | | |
| | N, I, L, C, H, K, G | | | | |
| 38 | M, S, V, H, Q, D, C, N, A, K, E, T, | F | | | |
| | G, L, Y, R, I | | | | |
| 39 | G, A, N, S | | | X | |
| 40 | I, G, Y, M, K, W, Q, T, D, R, S, E, | | | | |
| | F, V, N, H, L, C, A | | | | |
| 41 | H, M, T, G, V, R, N, K, Y, L, D, F, | | | | |
| | Q, S, I, A, E, W, C | | | | |
| 42 | T, I, V, C, N, S, Y, L, A, R, M, W, | | | X | |
| | Q, H, K, D, F, E | | | | |
| 43 | K, R, C, D, N, G, E, Q, A, H, V | S, M | | | X |
| 44 | D, L, Y | S, A, N | | | X |
| 45 | W, Q, L, A, S, E, D, I, G, V, M, C, | R | | | |
| | P, K, N, F, Y, T, H | | | | |
| 46 | Q | E, V | X | | |
| 47 | V | | X | | |
| 48 | W, V, L, E, S, A, Q, F, T, R, I, M, | N, D | | | |
| | K, Y, H, G, C, P | | | | |
| 49 | M, Q, N, T, A, R, K, V, I, L, S, H, | | X | | |
| | G, F | | | | |
| 50 | N, C | | X | | |
| 51 | C, V, I, E, A, G | | | | |
| 52 | V, A, C, E, D, I, Q, R, N, S, M, L, | H, Y | | | |
| | W, K | | | | |
| 53 | N | | X | | |
| 54 | I, V, C, T | A | | X | |
| 55 | Y, F, I, H, R, V, N, K, W, L, M, Q | C, A, E | | | |
| 56 | Y, W, D, T, H, S, N, E, C, R, A, V, | | | | |
| | I, L, Q, M, F, G, K | | | | |
| 57 | I, V | | X | | |
| 58 | I | | | X | |
| 59 | L, T, G, C, Q, A, H, N, D, E, R, S, | V, I | | | |
| | M, Y, K, W, F | | | | |
| 60 | H, K, R, G, Q, L, A, Y, N, F | M, I, S, T, W | X | | |
| 61 | V, A, T, M, S, L, Y, H, F, I, Q, K, | G | | X | |
| | N, R, W, C, P | | | | |
| 62 | C, D, A, E, V, M, R, T, I, G, H, K, | Y, W | | | |
| | Q, S, N, P, L, | | | | |

TABLE 13F
EGER_mb5
DHWEEVERWALEHLQEATQQNDPQKAKKILEEAHKWLRRELSEEEARAVVRWLKQLVDRELS
(SEQ ID NO: 143)

| | | | | | |
|---|---|---|---|---|---|
| 1 | F, M, L, W, V, P, Y, T, A, C, I | E, H, G, R, K, Q, S, D, N | X | | |
| 2 | G, R, A, K, D, E, N, T, Q, H, S, Y | | | | |
| 3 | W | | X | | |
| 4 | D, E, T, S | | X | | |
| 5 | D, W, T, A, G, M, Q, S, E, N | F, H, K, Y | | | |
| 6 | T, V, I, A, E | | X | | |
| 7 | Y, F | | X | | |
| 8 | E, K, S, L, M, A, G, R, Q, C, H | | | | |
| 9 | Y, M, L, G, T, Q, V, A, H, E, S, R, D, | | | | |
| | I, K, C, W, N, F | | | | |
| 10 | S, G, H, A, T, N | | | X | |
| 11 | I, M, L, Q, P | | X | | |
| 12 | N, Q, G, S, Y, M, D, T, F, H, E, C, A, | | | | |
| | I, K, P | | | | |
| 13 | E, A, S, T, N, H, C, G, M, F, R | W, V, I, Q, D, K, L, Y | | | |
| 14 | Y, M, T, L, G | | | X | |
| 15 | S, P, N, V, F, W, T, G, R, C, D, H, E, | | X | | |
| | M, A, I, L, Q, K, Y | | | | |
| 16 | H, G, K, T, V, Q, A, S, D, N, E, I, C, | | | | |
| | R | | | | |
| 17 | P, S, T, Q, N, C, D, A, E, Y, K, V | | | X | |
| 18 | K, E, W, N, V, D, H, R, S, G, A, Y, P, | | | | |
| | T, Q, M, C, L, F | | | | |
| 19 | V, Q, P, G, K, A, L, N, R, H, D, Y, I, | | | | |
| | W, S, E, F, T, M | | | | |
| 20 | Y, P, V, A, L, T, I, S, E, H, D, M, F, | | | | X |
| | R, N, K, Q, G, C | | | | |
| 21 | C, R, K, A, H, Q, G, N, D, S, E, Y, V, | | | | X |
| | I | | | | |
| 22 | S, C, E, H, N, D, K, M, Q, Y, T, A | | | | X |
| 23 | E, M, H, K, I, W, A, L, D, R, T, V, N, | | | | |
| | Y, Q, G, P, S, F, C | | | | |
| 24 | I, N, A, Q, G, H, V, L, K, D, S, W, M, | | | | |
| | F, T, P, R, E, C, Y | | | | |
| 25 | N, I, V, E, H, G, W, F, M, L, R, S, A, | | | | |
| | Y, K, Q, C, T, C | | | | |
| 26 | K, L, P, C, R, G, T, V, Y, F, H, S, E, | | | | |
| | A, M, I, Q, N | | | | |
| 27 | Y, E, I, F, A, V, C, D, P, L, G, H, M, | | | | |
| | N, T, Q, R, K, S, W | | | | |
| 28 | W, R, L, M, S, V, D, Y, Q, E, F, I, G, | | | | |
| | T, A, N, K, H, C | | | | |
| 29 | T, V, I | | | X | |
| 30 | I, F, M, L, Y, A, T, V, Q | | | | |
| 31 | T, H, I, L, W, C, G, K, F, V, M, R, Q, | | | | |
| | E, N, Y, S, A, D | | | | |
| 32 | V, K, A, M, C, N, H, Q, I, T, D, W, S, | | | | |
| | R, E, Y, L, G, P | | | | |
| 33 | A, S, T | | | X | |
| 34 | K, T, Y, L, A, M, N, Q, E, G, F, D, S, | | | | |
| | H, R, V, P, C | | | | |
| 35 | Q, H, G, F, R, A, E, P, V, W, D, L, Y, | | | | |
| | N, I, C, K, T, S, M | | | | |
| 36 | R, K, W, A, I, D, C, F, Q, G, T, V, Y, | | | | |
| | S, L, H, N, M, E | | | | |
| 37 | F, I, L, M | | | X | |
| 38 | E, T, Q, G, S, K, M, I, V, L, A, R, C, | | | | |
| | H | | | | |
| 39 | Q, T, V, K, E, A, W, G, F, H, Y, S, M, | | | | |
| | N, I, C, L, R | | | | |
| 40 | S, T, Q, V, H | A, N, R, K, L, M, W, Y, G, | | | X |
| | | I, C, E, D, F | | | |
| 41 | L, M | | X | | |
| 42 | P, E, Q, M, D, T, A, S, H, N | | | | X |
| 43 | Q, D, K, A, E, N, G, V, Y | S, P | | | |
| 44 | G, M, N, T, L, Q, A, D, S, P, E, R, K, | | X | | |
| | V, H | | | | |
| 45 | E | | X | | |
| 46 | T, C, S, A, V | | | | |
| 47 | S, T, C, V, D, E, Y, I, L, W, H, G, K, | | | | |
| | R, A, F, Q, M, N | | | | |
| 48 | S | D, T, A | X | | |
| 49 | I, V | | X | | |
| 50 | L, T, G, S, A, C, I, V, Y, F, D, N | | | | |
| 51 | L, E, G, H, K, Y, Q, F, M, N, R, S, A, | | X | | |
| | W, C, D, V, T | | | | |
| 52 | W | H, Y | X | | |
| 53 | I, A, V, L, M | | | X | |
| 54 | L, Q, M, D, F, S, N, C, W, Y, P, E, H, | W, R, A, C, E, F, D, T, K, | | | |
| | R, I, T, K, G, V, A | N, M, L, I, Q, V, S | | | |
| 55 | Y, H | | X | | |
| 56 | L, M | | X | | |
| 57 | G, T, I, N, C, Y, M, S, A, F, H, V, W, | | | X | |
| | Q, L, E, P | | | | |
| 58 | K, F, R, A, S | M, I, Y, G, P, H, L, W, V, | | | |
| | | N, Q, E, T, D | | | |
| 59 | Q, D, E, G, C, N, F, Y, I, M, A, T, K, | | | | |
| | L, P, L, R, W, S, V | | | | |
| 60 | P, M, W, T, G, Q, S, K, D, H, R, E, N, | | X | | |
| | A | | | | |
| 61 | M, R, Y, C, E, Q, W, D, I, H, K, N, P, | | | | |
| | V, T, L, F, G, S, A | | | | |
| 62 | C, M, E, W, R, H, D, L, G, P, A, Q, T, | | | | |
| | F, V, S, I, Y, K, N | | | | |

TABLE 13G
EGFR_mb6
DEAAEEVLRYLKKLGDPELAELIERLLERVRKKKDPDLERTLEIIAVAVLYGDPEIARQALRALH
(SEQ ID NO: 7)

| | | | | | |
|---|---|---|---|---|---|
| 1 | D, E | N, V, Q, F | | | |
| 2 | W, Q, A, E, R | D, Y, H, C, K, M, V, L, I, G | | | |
| 3 | L, I, V, M, T, C | A, K, Q, D, E, P, S, H | X | | |
| 4 | A | | | X | |
| 5 | E, D | A, K, N, G | | | |
| 6 | K, A, T, L, F, I, Y, V, N, | E, G, D | | | |
| | M, S, Q, R, H, C, W | | | | |
| 7 | I, V | C, M, F, E, K, R | | X | |
| 8 | I | L, C | | | |
| 9 | K, R | T, V, I, N, S . L, C, Q, A, H, E, F, P, G | | | |
| 10 | Y, W | S, F, H, Q | | | |
| 11 | I | L, V | | X | |
| 12 | E, D, K | T, M, N, S, Q, A, C, L, Y, G, F | | | |
| 13 | K, R, C, N, H, A, S, D, G | Q, M, T, V, E, L | | | |
| 14 | A, V, T, C, M, I | L, S | | | |
| 15 | S, T, P, K, R, Q | G, E, N, H, D, A, C | | | X |
| 16 | W, D | P, A, G, V, Y, H, N, L, T | | | X |
| 17 | E, D, L, H, M, A, S, G, T, | I, R, W, P | | | |
| | N, V, Q, C, F, Y, K | | | | |
| 18 | E, G, Q, A | D, M, V | | | |
| 19 | I, V | L, R, C | | | |
| 20 | V, C, T | I, A, S | | | |
| 21 | D | E, N, L, M, H, F, Q, S, I, T, C | | | |
| 22 | L, I | V, H, T | | | |
| 23 | I, L | V, E | | X | |
| 24 | E | D, T | | | |
| 25 | K, C, A, E, V, S | R, N, T, H, Q, F, I, M | | | |
| 26 | I, V | L, F, M, T | | X | |
| 27 | L | I, A, N | | | |
| 28 | D, E | F, A, C, Y, I, V, N, S, W, H, T, L, G | | | |
| 29 | V, Q, L, C, A, K, S, I, N, | R, H, F | | | |
| | G, M, T, E | | | | |
| 30 | V, L | A, C, F | | | |
| 31 | A, E, Q, S, H | R, N, K, V, G, Y, T, D, W, M, L | | | |
| 32 | D, V, Q, M, A, E, C, L, I, | K, G | | | |
| | N, W, T, S, F, R, H, Y | | | | |
| 33 | S, Q, R, M, E, A, D, C | L, K, T, W, V, N, H, I, Y | | | X |
| 34 | N, Q, G, A, D, C | E, K, H, R, S, M, P | | | X |
| 35 | D | V, C, N, G | | | X |
| 36 | E, D, Q, S, T, N | A, Y, V, P, L, K, F, M, H, W, R, I | | | |
| 37 | D | E, G, N, Y, T, F, K, Q, R | X | | |
| 38 | L | E | | | |
| 39 | E | D, F, S, H | | | |
| 40 | K, A, R, Q, S | H, N, F | X | | |
| 41 | V, R, T | K, A, I | X | | |
| 42 | I, V | L, M, G, S | | X | |
| 43 | E | D, A | X | | |
| 44 | I | L, W | X | | |
| 45 | V, I | C, T, M, L, G, A | X | | |
| 46 | C,A | S, P, L, F | | X | |
| 47 | L,I | V | X | | |
| 48 | S | A, F, E, R | X | | |
| 49 | V | G, Y, I | | X | |
| 50 | H, L | I, D | | | |
| 51 | Y | | X | | |
| 52 | W, H, Q, N, G | K, A, D, R, C | | | X |
| 53 | D | Y, F | X | | |
| 54 | P | A, N, H | | | |
| 55 | D, E, N | G | | | |
| 56 | I,L | M | X | | |
| 57 | A, C, L | V, D | | | |
| 58 | R | | | | |
| 59 | T, D, N, E, S | Q, G, R, V. H, A, K, L | X | | |
| 60 | G | S, A, R, N, E, Q | X | | |
| 61 | L | F,Q | | X | |
| 62 | A, F, G, S, Y, K, H, W, Q, | R, E, L, N, C, D, V | | | |
| | M, T | | | | |
| 63 | E, D, Q | T, A, V, N, S, M, G, H | X | | |
| 64 | L, E, W | M, A, D, K, S, G, Y, I | X | | |
| 65 | H, L | | | | |

TABLE 13H
FGFR2_mb1
SEELIKKALELLRQGNPDRAAQVLLFLAFQTGDPRVRELFSLLVEAMQKNDPELLKRVRRLLEET
(SEQ ID NO: 20)

| | | | | | |
|---|---|---|---|---|---|
| 1 | K, A, Q, R, V, L, G | M, Y, T, S, I, F, D, N | F | F | F |
| 2 | Y, G, F, I, R, W, M, H, L, P, | E | | | |
| | V, K, T, Q, S, A, N | | | | |
| 3 | G, K, L, M, S, R, P, V, Y, H, A, I, | F, T, E | | | |
| | N, Q | | | | |
| 4 | N, S, C | G, L, K, T, Y, H, E, M, A | | | |
| 5 | K, R, P, F, M | I, Q, H, C, N, S | | | |
| 6 | W, R, K, C, A, M, S, E, P, I, H, V, | | | | |
| | G, L, Y, Q | | | | |
| 7 | F, G, E, Y, N, K, A | D, S, M, Q | | | |
| 8 | A, S, V, G, I, P, T, C | | X | | |
| 9 | H, I, Y, L, Q, T, R, V, F, W, E, C, | | | | |
| | G, D, N | | | | |
| 10 | R, A, Y, L, G, N, T, I | M, H, F, V, K, E, Q, S, D | | | |
| 11 | L, D, C, H, K, E, R, M, N, T, W, F, | | | | |
| | G, S, A, I, P, Y, V, Q | | | | |
| 12 | I, V, M, L, Y, C, H, E, F, A, Q | | X | | |
| 13 | Y, R, L, N, A, I, C, M, F, W, S, G, | | | | |
| | Q, T, D, V, H, E | | | | |
| 14 | L, V, S, M, Q, E, H | D, W, R, I, G, N | | | |
| 15 | N, D, K, H, G, A, Q, F, T, C, M, Y, | | | X | |
| | R, L, E, V | | | | |
| 16 | D, E, L | T, N, H, A, I, V, Q, F, R | | | |
| 17 | P, S, K, N, E, T, R, Q, V, A, M, H, | | | | |
| | I, Y, F, D, G, L, W | | | | |
| 18 | D, H, S, G, W, E, N | | X | | |
| 19 | E, G, N, Q, A, D, M, T, P, W, S, H, V | L, Y, F, R, C | | | |
| 20 | A, S, C, G, T | | | X | |
| 21 | A, C, V, G, S | | X | | |
| 22 | H, S, G | Q, T, A | X | | |
| 23 | Y, L, H, I, M, V | K, E, T, Q, R, W, F, D, | | X | |
| | | P, S, G | | | |
| 24 | M, L | | | X | |
| 25 | L, M | | X | | |
| 26 | T, F | | X | | |
| 27 | L, N, Y, H, T, S, W, A, I, K, R, M, | | | X | |
| | Q, C, F, V | | | | |
| 28 | A | | X | | |
| 29 | Y | F | X | | |
| 30 | W | Q, K, L, G | X | | |
| 31 | T, A, G, S | | | | |
| 32 | K, M, R, Q | G, L, H, S, N | | | X |
| 33 | N, R, K, L, W, I, Q, Y, V, S | M, F, D, H, G, T | | | X |
| 34 | E, K, D, P, H, I, N, S, T | Y, F, V, Q, A, W | | | |
| 35 | E, D | R, C, T, H, N, G, K | | | |
| 36 | L, I | Q, V, T, M, F, S, A | | X | |
| 37 | G, E, Q, A, T, S | R, K | | | |
| 38 | R, I, L, V, M, K, F | Q, T, E, H, S, W, N | | | |
| 39 | L, Q, W, E, K, D, H, V, S, I, M, N, | | | X | |
| | G, Y, C, R, F, A, T | | | | |
| 40 | F, T | | X | | |
| 41 | T, C, Q, M | K, S, I, G, V | X | | |
| 42 | S, M, W, L | C, Q, K, V, D, Y, N, E, | | | |
| | | H | | | |
| 43 | T, V | L, I, S, N | | X | |
| 44 | H, A, S, Y C, F | M, V, L, K | X | | |
| 45 | G, L, Y, S, D, M, H, E | F, A, T, R, N | X | | |
| 46 | G, S, A | F, T | | X | |
| 47 | Y, Q, E, C, T | H, G, M, V, A, F, D | | | |
| 48 | E | Q, H, Y, K, S, D, G, M, | X | | |
| | | R, V | | | |
| 49 | Y, W, F, D, H, L, K, N, E, V, Q, M, | | | | X |
| | S, T, P | | | | |
| 50 | H, N, D, P, C, A, E, Q, M, V, I, K, | | | | X |
| | W, R, T, F, G, S, Y, L | | | | |
| 51 | K, R | S, Q, T | | | X |
| 52 | N, L, F, I, R, D, V, A, E, T, M, Q, | K, S, C, W | | | |
| | Y, G, H, P | | | | |
| 53 | V, H, F, D, I, S, Q | W, E, P, R, N, Y, K, T, | | | |
| | | L | | | |
| 54 | I, M, Q, L | R, C, Y, N, V, P | | | |
| 55 | Y, H, V, Q, L, A, M, E | S, C, K, F, R, W | | | |
| 56 | S, L, M, K, T, Q, V, N, I, E, G, C, | | | | |
| | P, W, Y, R | | | | |
| 57 | K, R, Y | N, W, V, H, C, F, I, T, | | | |
| | | S, G | | | |
| 58 | C, V, I, A, F, S, Q, G, L, P, H, T, | | | X | |
| | Y, M | | | | |
| 59 | K, R, H, E, V, P, W, D, M, L, I, N, | | | | |
| | Y, G, T, S, Q, A | | | | |
| 60 | V, W, R, D | G, Q, N, M, F, C, I, A, | | | |
| | | E | | | |
| 61 | G, D, R, N, M, Y, S | T, E, H, L, A, I, W, K | | | |
| 62 | L, M, I, C, A, V, T, G, F, S | | X | | |
| 63 | A, K, E, V, T, Y, H, G, N, Q, M, I, | | | | |
| | F, R, W, C, D | | | | |
| 64 | Q, T, Y, F, S, W, H, I, G, K, E, M | P, A, R, L, C | | | |
| 65 | K, L, R, W, Y, F | T, A, H, M, V, G, I, N | | | |

TABLE 131
FGFR2_mb2
LEKLERVALLAVRLYMRIGDPEIAKIWFKVMELLHAYQAGHLDEEEAKRRADKLEKELRKFI
(SEQ ID NO: 21)

| | | | | | |
|---|---|---|---|---|---|
| 1 | V, K, F, T, Q, D, E, I, N, L, H, | A | | X | |
| | W, G, M, R | | | | |
| 2 | L, A, D, W, G, Q, P, E, R, F, N, | | | | |
| | S, V, Y, M, H, | | | | |
| 3 | H, D, A, Y, V, R, P, E, S, T, K, N | G, F | | | |
| 4 | T, W, I, L, Y | | | X | |
| 5 | Q, D, E | | X | | |
| 6 | E, G, Q, D, N, F | H, Y, A, V, M, I, L, P, W, | | | |
| | | R, S | | | |
| 7 | M, S, A, V, N, L, T | | | X | |
| 8 | Q, G, S, E, A, M, N | | | | |
| 9 | Y, L, V | | X | | |
| 10 | Y, H, Q, L, E | | | | |
| 11 | G, A, S | | | X | |
| 12 | V, I, L | | X | | |
| 13 | A, K, S, G, N | R, T, Q | X | | |
| 14 | M, G, I, V, L, A, K | | | X | |
| 15 | V, Y, W, F, N | | X | | |
| 16 | F, M, L | | X | | |
| 17 | G, K, A, H | V, M, Y, P, L, T, I, W, S, R, | | | |
| | | Q, F | | | |
| 18 | E, Y, K, N, F, D | G, W, Q, T, H, M, A, S, R, L, | | | |
| | | V, I | | | |
| 19 | Q, M | L, T, D, K, E, F, S, H, P, G, | | | X |
| | | V, N, R | | | |
| 20 | V, L, W, I, H, S, N, R, D, Q, F, M, | | | | X |
| | A | | | | |
| 21 | D, N, S, Q | V, M, K, H, R, P, E, A, G | | | |
| 22 | A, H, V, F, G, R, S, K, W, Q, N, I, | | | | |
| | E, T, Y, M, L | | | | |
| 23 | T, Q, P, S, V, A, I, H | | | X | |
| 24 | A, S, R | | X | | |
| 25 | A, E, T, L, M, V, W, Y, H, I, K, R, | | | | |
| | N, F, G, Q, D | | | | |
| 26 | D, I | G, H, V, S, A, L, R, Q, M, T, Y | | X | |
| 27 | W | | X | | |
| 28 | W | F | X | | |
| 29 | E, I, Q, D, T, V, Y, A, R, F, N, M, | W | | | |
| | G, S, K | | | | |
| 30 | I, M, S, L, D, E, V, A, T, Q | | | X | |
| 31 | H, M, K, R | | X | | |
| 32 | D, S, E, Q, T, N | | X | | |
| 33 | N, A, F, H, G, L, D, T, Q | R | | X | |
| 34 | R, D, A, S, I, V, Q, L, E | | | | |
| 35 | K, E, W, Y, L, S, V, N, G, R, T, M, | D | X | | |
| | H, Q | | | | |
| 36 | M, H, N, W, L, Y, Q, G, V, A, R, K, | | | | |
| | P | | | | |
| 37 | T, M, E, R, A, P, V, Y, Q, N, K, D, | | | | |
| | H | | | | |
| 38 | E, K, D, A, P, S, I, Q T, G | | X | | |
| 39 | N, I, L, M, Q, W, K, V, D, A, H, E, | | X | | |
| | R | | | | |
| 40 | H, A, V, I, D, S, E, F, K, Y, T, G, | L, N | | | X |
| | W, M, P, R | | | | |
| 41 | Y, V, G, L, A, R, P, N, I, F, S, H, | | | | X |
| | T, M, Q | | | | |
| 42 | Q, I, P, Y, E, K, V, H, D, L, A, T, | | | X | X |
| | G, M, N, F | | | | |
| 43 | K, M, S, W, F, P, G, L, Y, E, R, D, | | | | X |
| | Q, V, A,T H, N | | | | |
| 44 | K, D, I, Y, W, H, G, E, Q, T, R, F, | | | | |
| | L, P | | | | |
| 45 | P, H, S, A, F, I, Q, K, G, Y, R, E, | | | | |
| | W, V, M, T, L | | | | |
| 46 | K | I, L, Y, Q, H, R, A, G, M, P, E, | | | |
| | | D, W, V, F | | | |
| 47 | M, V, H, Q, S, G, T, A, N, P, D | | | | |
| 48 | H, W, A, D, Q, V, S, F, T, R, P, K, | I | | | |
| | L, M | | | | |
| 49 | F, K, N, D, T, A, E, I, Y, M, W, R, | | | | |
| | V, S, L | | | | |
| 50 | I, V | D, P, L, Y, K, N, G, R, H, Q | | | |
| 51 | Y, N, F, S, W, R, Q, K, H, A, G, P, | | | | |
| | V, E | | | | |
| 52 | W, K, Y, F, N, M, H, L, P, R, A, D, | | | | |
| | S, E, G, V, T, I | | | | |
| 53 | E | W, Y, Q, S, V, F, G, A, K, I, L, | | | |
| | | M, P | | | |
| 54 | H, Y | N, M, I, D, A, R, S, F, Q, K, V, | X | | |
| | | L, W, G, T, E | | | |
| 55 | N, L, K, F, G, W, H, T, E, S, M, Y, | | | | |
| | A, R | | | | |
| 56 | E, Y, W, G, H, S, F, Q, T, K, P, R | | | | |
| 57 | R, K | T, H, G, A, I, S, W, P, V, M, E, | | | |
| | | Y, L, F | | | |
| 58 | M, V, I, L, T, A, F | | X | | |
| 59 | E, Y, V, Q, A, H, L, F, R, G, N, M, | | | | |
| | S | | | | |
| 60 | H, V, R, D, E, F, L, W, P, T, G, M, | | | | |
| | K, A, N | | | | |
| 61 | Y, W, H, N, I, V, M, E, Q, R, F, K, | | | X | |
| | P | | | | |
| 62 | Y, G, N, S, R, I, H | A, L | | | |

TABLE 13J
EGFR2_mb3
DRRKEMDKVYRTAFKRITSTPDKEKRKEVVKEATEQLRRIAKDEEEKKKAAYMILFLKTLG
SEQ ID NO: 144

| | | | | | |
|---|---|---|---|---|---|
| 1 | N, K, Y, W, F, I, P, L, A, H, | | | | |
| | Q, V, S, E, R, D, T, G, M | | | | |
| 2 | F, N, R, W | V, G, D, E, I, H, A, Y, T, L, Q, | | | |
| | | K, P, M, S | | | |
| 3 | K, F, M, R, Y, Q, I | W, P, A, E, G, T, D, V, S, N, H, L | | | |
| 4 | S, T, N | I, E, V, G, W, Y, Q, A, P, M, D, | | | |
| | | F, H, R, K, L | | | |
| 5 | F, S, A, I, Q, M, D, L, N, | H | | | |
| | Y, E, K, W, V, T, R, P | | | | |
| 6 | M, F | I, W, L, Y | | X | |
| 7 | E, M, Q, I, L, Y | V, F, H, T, A, K, R, G, | X | | |
| | | S, W, N, D | | | |
| 8 | A, E, D, F, S, Q, W, L, Y, H, V, | | | | |
| | R, M, T, K, G, N, I | | | | |
| 9 | V, A | | | X | |
| 10 | Y | | X | | |
| 11 | V, K, I, Q, R, A, H | M | X | | |
| 12 | W, D | Y, S, Q, F, H, K, A, N, V, I, L, | | | |
| | | M, G, T | | | |
| 13 | Y, A, F, E | | | X | |
| 14 | Y, W, F | | X | | |
| 15 | F, A, E, Q, I, S, M, W, G, T, | | | | |
| | H, N, V, D, Y, L, K, R | | | | |
| 16 | L | Y, M, N, H, E, A, F, D, I, Q, V, | | | |
| | | K, S, R, T | | | |
| 17 | L, I, N, T | | | X | |
| 18 | M, E, I, H, S, K, L, N, Y, | R | | | |
| | V, F, Q, T, A | | | | |
| 19 | G, Q, D, R, T, A, M, H, L, | K | | | |
| | E, N, S, I | | | | |
| 20 | E, T, N | Q, D, S, A, M, Y, L, H, V, W, F, | | | X |
| | | I, G | | | |
| 21 | D, S, R, N, T, K, E, Q | H, I, F, A, M, L, W, Y, G, V, P | | | X |
| 22 | N, E, S, D, A, Y | | | | X |
| 23 | H, P, L, R, Y, T, W, G, S, Q, I, | | | | |
| | A, M, N, V, F, K, E | | | | |
| 24 | S, K, N, L, I, D, Q, H, M, V, R, | | | | |
| | T, Y, W, G, A, F, E | | | | |
| 25 | S, Y, I, A, T, M, V, L, R, G, E, | | | | |
| | Q, N, K, H, D, F, P | | | | |
| 26 | R | V, N, H, I, K, Q, S, A, M | | | |
| 27 | M, V, D, F, S, T, H, Y, Q, N, I, | | | | |
| | R, W, L, E, A, K, G | | | | |
| 28 | K, T, N, H, L, M, V, I, S, R, W, | | | | |
| | Q, E, A, F, Y, G, D | | | | |
| 29 | A, Y, V, I, T, L, D, G | | | X | |
| 30 | Y, W, L, I, V, A, S, G, F, R | | | | |
| 31 | A, F, R, W, S, I, H, L, G, Q, N, | | | | |
| | T, Y, V, M, K, D, E | | | | |
| 32 | D, V, T, K, H, Q, N, W, S, E, A, | | | | |
| | R, F | | | | |
| 33 | T, V, Y, A | | | X | |
| 34 | A, E, N, Y, M, V, H, D, R, Q, I, | | | | |
| | T, L, G, S, P | | | | |
| 35 | H, R, W, M, Q, D, F, I, Y, V, K, | | | | |
| | L, A, T, G, S, E, N | | | | |
| 36 | Q | K, S, A, E, D, Y, T, V, F, M, H, | | | |
| | | R, I, L, W, N | | | |
| 37 | M, L, V, I, R | | | X | |
| 38 | H, F, S, T, N, V, A, K, Q, M, Y, | | | | |
| | W, L, R, G, I, E, D | | | | |
| 39 | S, G, K, E, H, V, I, Y, N, Q, F, | | | | |
| | W, M, A, T, R, D, L | | | | |
| 40 | Y, L, F, V, M, I, A | | | X | |
| 41 | A, P | | | X | X |
| 42 | V, Y, G, H, Q, I, R, M, E, | A | | | X |
| | L, T, F, K, N, S | | | | |
| 43 | N, S, T | K, H, A, G, R, D, Q | | | X |
| 44 | P, N, V, K, A, Y, Q, T, D, | M, F, R | | | |
| | H, S, E, G | | | | |
| 45 | P, K, R, A, T, N, M, W, S, | L | | | |
| | G, H, Y, Q, E, V, D, F | | | | |
| 46 | D, H, A, M, Q, G, T, S, E, N, I | | | | |
| 47 | M, I, R, L, K, T, N, E | | | | |
| 48 | M, R, L, K, Y, N, Q | | X | | |
| 49 | K | T, R, I, V, Y, M, A, E, | X | | |
| | | W, F, H, L, Q, S | | | |
| 50 | V, A | | | | |
| 51 | A, G | Q, E, S, M, N, H | X | | |
| 52 | Y | F, M, L | X | | |
| 53 | M | Y, I | X | | |
| 54 | I | L, Q, T, R, M, A, G, E, V, S | | | |
| 55 | I, V | T, A, S, E, M, L, H, Q | X | | |
| 56 | F X | | | | |
| 57 | L | | | | |
| 58 | W, E, T, L | F, M, Y, H, D, G, Q, N, A, I, V, | | | |
| | | R, S, K | | | |
| 59 | E, S, Q, G, H, N, V, T, I, Y, L | | X | | |
| 60 | M, L, I, F, H | V | X | | |
| 61 | A,V, I | Q, L, W, H, T, Y, M, G, P, S, | | | |
| | | F, N | | | |

TABLE 13K
FGFR2_mb4
DKKELSDTAEKLLKDALDKNDDSKFISAVFFALKVAKDVNDERLERIVVKLYNEFMNRYH
(SEQ ID NO: 23)

| | | | | | |
|---|---|---|---|---|---|
| 1 | W, F, N, M, A, P, E, Q, V, | D, R | | | |
| | S, L, I, G, K, H | | | | |
| 2 | D, N, W, G, F, S, M, A, V, | E, R, K, C, L | | | |
| | H, Q, I | | | | |
| 3 | H, V, E, S, N, C, Y, P, D, L, | | | | |
| | W, K, T, F, R | | | | |
| 4 | R, P, H, F, W, L, A, S, I, | N, E, M, D, K, Y | | | |
| | G, C | | | | |
| 5 | T, C, K, F, S, I, M, Q, A, | W, L, G, N | | | |
| | E, D, V | | | | |
| 6 | N, P, L, H, W, T, E, R, A, | F, S | | | |
| | K, C | | | | |
| 7 | L, V, G, Q, H, I, K, C, R, | A, E, Y, P | | | |
| | M, T, W, S, D | | | | |
| 8 | R, I, Y, N, M, D, G, F, L, | H | | | |
| | Q, V, E, A, W, C, S, T | | | | |
| 9 | H, A, S | | | X | |
| 10 | K, V, A, Q, S, M, L, T, H | I, E, R, Y | | | |
| 11 | A | S, F, Q, H, G, C, T, W, Y, L, R, V, | | | |
| | | E, K, I, M | | | |
| 12 | H, I, K, N, T, F, A, W, S, L, | | | | |
| | Q, R, M, Y, V | | | | |
| 13 | I, M, L | | | X | |
| 14 | H, Q, Y, L, G, I, F, C, V, W, | | | | |
| | D, E, K, T, N | | | | |
| 15 | A, K, W, S, F, T, H, L, V, | E, D, N | | | |
| | I, Y, R, G, M, Q, C | | | | |
| 16 | L, F, T, S, W, Y, Q, G, H, | V, R, A, C, E | | X | |
| | N, M | | | | |
| 17 | A, F, W, N, V, T, G | I, S, L, H, K, Q, M, C | | | |
| 18 | I, S, A, F, L, Q, P, T | W, Y, V, G, D, C, H, R | | | |
| 19 | Y, D. H, T, V, E, G, L, N, | M, Q, I, C | | | X |
| | W, S, R, A, K | | | | |
| 20 | V, E, M, D, C, T, R, A, F, | L, K, S, Q, N, H | | | X |
| | P, Y | | | | |
| 21 | S, H, N, E, D | | | | X |
| 22 | M, I, E, F, Q, T, P, H, V, | W, R | X | | |
| | L, G, A, N, S, Y, D | | | | |
| 23 | D, N, Q, G, A, S, T, V, E | | X | | |
| 24 | G, N, L, H, V, Y, E, M, S, | Q, K | | | |
| | I | | | | |
| 25 | V, F, M, I | | | | |
| 26 | F, M, L, I, A | Y, V | X | | |
| 27 | G, A, P, S | | X | | |
| 28 | V, C, I, R, A, T | S, G | | X | |
| 29 | I, T, M, V | | X | | |
| 30 | Y, I, L, W, V | F | X | | |
| 31 | W, H, N, L | M, F, Y, G | | | |
| 32 | Y, G, S, C, A | | | X | |
| 33 | Q, Y, W, M, V, I, T, L, S | | X | | |
| 34 | G, D, N, M, Q, T, R, A, E, | H, S | | | |
| | K | | | | |
| 35 | R, H, M, L, A, C, T | V, Q | | X | |
| 36 | V, A, S, C | | | X | |
| 37 | E, D, S, T, R, Y, V, A, G, M, | | | | |
| | K, L, C, N, I, Q | | | | |
| 38 | W, I, A, E, M, G, L, R, S, | Q, D, V, N, Y, T | | | |
| | H, C, K, F | | | | |
| 39 | E, T, H, S, D, K, Y, N, W, | G, L, Q, I, V, A | | | X |
| | R | | | | |
| 40 | G, K, H, R, D, P, Y, E, F, | T, L, Q, N, A, C, I | | | X |
| | V | | | | |
| 41 | N, S, D | | | | X |
| 42 | T, N, K | C, M, G, R, I, S, Y, D, Q, L, F, E, | | | |
| | | A, P | | | |
| 43 | K, N, Q, I, V, F, L, G, C, | R, W | | | |
| | Y, D | | | | |
| 44 | L | | | X | |
| 45 | H, T, G, M, A | Q, E, D, Y | X | | |
| 46 | T, Y, E, K, G, M, F, A, S, | H, P | | | |
| | C, L, D, W, Q, N , R | | | | |
| 47 | T, N, A, V, E, Y, C, S, R, | | | | |
| | L, M, G | F, I, K, W | | | |
| 48 | C, I, T | V, A | | X | |
| 49 | I, V | T | X | | |
| 50 | N, M, H, Y, T, A, L, V, Q, | K, D, F, G | | | |
| | R, W, E, I, S | | | | |
| 51 | Y, M, I, R, N, F | C, T, S, V, K, H, D, G, E, L, A | | X | |
| 52 | Y, N | | X | | |
| 53 | D, C, S, W, G, Y, N, M, V | | X | | |
| 54 | T, I, M, R, A, H, G, K, N, | F, V | | | |
| | Q, L, S, C, Y, W, E | | | | |
| 55 | Q, K, W, G, E, H, A, F, R | | | X | |
| 56 | F, Y, W, N, I | H, S, G, C, M, T, V | X | | |
| 57 | M, C, S, R, I, W, F, H, L, | N, Y, V, Q, P | X | | |
| | G, K, A | | | | |
| 58 | F, D, E, V, Y, S, I, T | G, Q, H, R, M, C, A | | | |
| 59 | M, V, T, N, H, F, K, E, L, | D, I, R, Y, P, Q | X | | |
| | G, W | | | | |
| 60 | K, P, M, Q, W, Y, E, G, V, | S, A, H, T, I | X | | |
| | D, N, F, R, L | | | | |

TABLE 13L
FGFR2_mb5
DYERVISRAIELALKKGDEKALHILNEIFFAAHRGELDPTEAERLARRIEKKLRS
(SEQ ID NO: 24)

| | | | | | |
|---|---|---|---|---|---|
| 1 | K, R, N, D, M | T, Q, S, A, H, F, V, G, I, E, Y, L | | | |
| 2 | Y | G, W, I, L, F, P, K | | X | |
| 3 | D, E | P, S, N | X | | |
| 4 | I, P, R, V, K, Q, G | A, T, M, W, E, C, H, Y | X | | |
| 5 | P, I, V, L | W, K, Y, M, R, E, H, T, G, F, C, A | | X | |
| 6 | I | Y, C, S | X | | |
| 7 | S | | X | | |
| 8 | H, W, Q, N, A, R, M, C, V | G, S, L, F, K | | | |
| 9 | N, A, G, S, L | T, I | | X | |
| 10 | M, I | C | X | | |
| 11 | F, S, Y, G, E | A, D, P, K, T, N | X | | |
| 12 | E, Q, N, L, W, M, R, I, K, | C, A, T, D, S, V | | X | |
| | F, Y | | | | |
| 13 | S, C, A | T | | X | |
| 14 | I, L | M | X | | |
| 15 | R, E, Y, H, F, V, A, S, G, | N, L, C, M | | | |
| | I, W, K, T, D | | | | |
| 16 | L, E, V, H, E, N, K, Y, T | A, C, W, S, R, Q, G, D | | | |
| 17 | G, N, S, W | M, P, E, C, H, D, V | | | X |
| 18 | K, R, D | C, E, N, H, A, S | | | X |
| 19 | W, N, T, F, H, M, G, V, S, | R, A | | | |
| | I, Y, K, D, P, E, L, Q | | | | |
| 20 | H, S, P, K, V, Q | E, D, N, T, Y, I, L | | | |
| 21 | R, F, K, S, M, Q, C, H, L, | V, Y, T, I, D | | X | |
| | A, N, W | | | | |
| 22 | L | E, A, S, V, M | X | | |
| 23 | E, I, V, Q, L, P, T, H | K, M, S, R, N, C, A, G, | X | | |
| | | Y | | | |
| 24 | K, G, R, T, H, N, L, I, Q, | P | | | |
| | F, C, V, M, Y, S, A, W, | | | | |
| | E | | | | |
| 25 | A, C, L | V | | X | |
| 26 | D, N | M, Y, H | X | | |
| 27 | K, M, P, S, R, A, G, V, T, | H, D | X | | |
| | C, I, E, L | | | | |
| 28 | L, V, I, Y | T, F, Q | | X | |
| 29 | F | | X | | |
| 30 | F | | X | | |
| 31 | A, G | K, H, V | | | |
| 32 | A, C | T, G, D | | X | |
| 33 | F, I, H, Y | V, K, A, M, D, S, N, R | X | | |
| 34 | D, Q, W, R, N, C, A, Y, F, | G, E, H, L, V | | | X |
| | S | | | | |
| 35 | N, S, Q, G, T, W | H, F, L, Y, M, C, R, K, A | | | X |
| 36 | I, Y, R, G, K, M, F, P, N, | L | | | X |
| | T, H, V, S, E, W, A, C, | | | | |
| | Q, D | | | | |
| 37 | M, W, K, L, F | Y, I, N | | | X |
| 38 | P, Y, N, F, S, D, M, E, R, | L, W, A, I, H, Q, G, V, C | | | X |
| | K | | | | |
| 39 | T, L, P, R, Q | C, E, V, S, K, N, H, G, M, F, W, Y | | | |
| 40 | R, D, I, W, G, V, T, M, C, | K, E, Q, A, H, P | | | |
| | N, Y, F | | | | |
| 41 | Y, T, L, V, K, D, R, W, E, | A, H, I, N, S, M, G | | | |
| | Q, F | | | | |
| 42 | A | C, G, S, V | | X | |
| 43 | R, S, F, D, T, W, N, E, L, | H, C, M, A, K | | | |
| | Q, Y | | | | |
| 44 | I, L, Q, S, N, R, T, K | Y, H, V, A, G, C, F, D, M | | | |
| 45 | I, C, M, L, Y, H, F, W, T, | S, N, V, G, A | | | |
| | R, Q | | | | |
| 46 | A | S, G, V, K, M | | X | |
| 47 | K, L, F, D, T, R, Q, N, I, | A, M, H, S, W, C, Y | | | |
| | V | | | | |
| 48 | I, L, E, S, V, Q, K, A, M, | F, G, C, H, D, T, Y, W, P | | | |
| | R, N | | | | |
| 49 | M, I, Q, T | V, L, F, A, E | | X | |
| 50 | R, K, A, G, V, F, H, W, D, N, E, | | | | |
| | Y, S, C, T, M, L, Q, I | | | | |
| 51 | A, S, I, R, K, E, W, F | N, C, V, T, L, Q, H, M, G, D, Y | | | |
| 52 | N, Q, S, M, C, D, K, H, R, | Y, V, F, W, P, G | | | |
| | I, A, T | | | | |
| 53 | L, I, M, C | V, W | | X | |
| 54 | G, I, W, N, K, R, S, M | D, E, T, L, Q, H, F, C | | | |
| 55 | W, Y, M, F, H, E, S, L, V | D, R, C, G, I, P, A, T, Q, K | | | |

Z

TABLE 13M
FGER2_mb6
DLREKLQELWWRALEKGNEKAERLALRAFMGAWHGDTSEEEAKKIITEVERLIKS
(SEQ ID NO: 25)

| | | | | | |
|---|---|---|---|---|---|
| 1 | I, S, R, T, H, Q, M, W, Y | F, N, G, K, D, L, C, A, E | | | |
| 2 | Y, A, V, I, W, K, Q, F, S, | H, C, P, G, T | | | |
| | R, D, L, E, M | | | X | |
| 3 | T, A, S, I, N, G, D, V, F, P, | | | | |
| | Y, K, H, R, M, C, L, E, Q, W | | | | |
| 4 | P, R, Q, D, A, T, K, G, H, L, | | X | | |
| | E, N, S, I, V | | | | |
| 5 | R, A, T, V, L, K, W, I, C, | M, S, E, F, D | | | |
| | H, Q, N | | | | |
| 6 | Y, F, V, M, L | I | | X | |
| 7 | E, A, S, H, P, G, Q | | X | | |
| 8 | Y, K, M, C, L, A, W, N, S, | V | | | |
| | Q, G, E, T, R, H, F, I | | | | |
| 9 | I, V, Q, Y, L, M | | | X | |
| 10 | W | | X | | |
| 11 | Y, W, F | | X | | |
| 12 | E, Y, L, S, Q, I, H, M, G, | V | | | |
| | N, R, F, A, K, C | | | | |
| 13 | S, A | | | X | |
| 14 | Y, H, I, L, V | | X | | |
| 15 | I, R, G, Q, K, N, C, M, V, | T, D, S | | | |
| | E, H, L | | | | |
| 16 | Q, Y, R, L, H, I, D, S, A, | N, T, W, G, F, V, M, C, E | | | |
| | K | | | | |
| 17 | R, K, S, Q, E, G, D, H | N | | | X |
| 18 | I, Y, H, E, Q, N, D, C, A | S, V | | X | X |
| 19 | M, K, L, D, I, G, Q, S, H, | V, T, Y | | | |
| | P, R, N, E, A, F | | | | |
| 20 | P, S, E, N, Q, D, V, G, H, | F, Y, T, A, M, R, L | | | |
| | K | | | | |
| 21 | A | | | X | |
| 22 | N, E | M | X | | |
| 23 | H, D, W, F, T, L, V, Q, R, | Y | | | |
| | K, E, I, M, S, G | | | | |
| 24 | Y, F, L | | | | |
| 25 | A | S | | X | |
| 26 | L, I | | X | | |
| 27 | H, R, G | | X | | |
| 28 | C, A, L, V | | | X | |
| 29 | F, Y | | X | | |
| 30 | V, L, M, W | I | X | | |
| 31 | S, K, G, H, R, A | | X | | |
| 32 | N, Y, S, I, T, Q, R, L, G, | K, D | | X | |
| | V, F, A, W, M, H, E, C | | | | |
| 33 | Y, D, S, E, R, F, H, V, G, | M | X | | |
| | L, A, T, I, C, W, N | | | | |
| 34 | W, R, Y, A, N, K, Q, S, H, | E, G, L, T, M | X | | |
| | F | | | | |
| 35 | E, N, H, K, T, L, I, S, G, | V | | | X |
| | Y, E, Q, M, W, R, A | | | | |
| 36 | V, S, Y, M, R, I, F, T, A, | G | | | X |
| | H, N, K, Q, P, C, L, W, | | | | |
| | D, E | | | | |
| 37 | L, H, M, I, P, R, Q, E, C, | | | X | X |
| | N, V, T, Y, W, K, S, A, G | | | | |
| 38 | F, Y, K, P, H, T, M, W, G, | | | | X |
| | V, S, R, N, L, Q, C, A, I, | | | | |
| | E, D | | | | |
| 39 | I, D, P, M, C, T, V, A, L, | Q, R, Y | | | |
| | F, G, E, N, W, H | | | | |
| 40 | Y, C, Q, T, I, L, P, A, M, | N, G, W | | | |
| | V, E, D, R, S, K | | | | |
| 41 | Q, A, T, V, I, P, M, R, D, | N, W, K, Y | | | |
| | L, F, C, H, S, G, E | | | | |
| 42 | W, Q, T, F, M, Y, G, R, S, | C, N, E, H | | | |
| | I, V, A | | | | |
| 43 | L, C, T, V, Y, S, R, G | M, H, A, K, I, W, D, E, F, N | | | |
| 44 | T, V, I, H, A, W, K | P, R, L, N, F, M | | | |
| 45 | W, A, H, S, Y, V, I, Q, T, F, | | | X | |
| | L, G, K, R, C | | | | |
| 46 | V, C, I, L | E | | | |
| 47 | G, Y, R | D, S, N, P, V, K, I, W, F, L, T, H, | | | |
| | | A, Q, E | | | |
| 48 | N, T, W, Q, A, H, R, Y | M, K, L, E, D, I, C, V, F, S | | | |
| 49 | V, I, L, C | | | X | |
| 50 | S, N, T, R | M, V, I, Q, E, L, D, G, H, A, K, C, W | | | |
| 51 | V, T, I | H, W, E, A, R, E, K, Y, Q, C, L, M, G | | | |
| 52 | M | I, L, Q, S, E | | X | |
| 53 | V, F, I, M | T | | | |
| 54 | R, A, W, V, T, S, E, H, D, | N, Y, Q, C, I, M, F | | | |
| | K, L, G, P | | | | |
| 55 | Q, E, T, W, D, P, M, A, F, | C, V, L, I | | | |
| | N, R, K, Y, S, H, G | | | | |

TABLE 13N
FGFR2_mb7
SEIHKKLARLLSKAIQKGDRKANHIVIRAAMAYEKGLIDPDQARKLAEKAERILRS
(SEQ ID NO: 26)

| | | | | | |
|---|---|---|---|---|---|
| 1 | K, E, D, G, T, R, L, N, M, | C, F, V, P, I, W, H | | | |
| | S, Y, Q, A | | | | |
| 2 | D, S, G, E, Y, W | A, P, F, Q, N, R, L, C, M, H | | | |
| 3 | L, I | V, Q, F | | | |
| 4 | M, E, Q, S, R, T, Y, H, A, | L, V, N, F, W, D, P | X | | |
| | G, I, K | | | | |
| 5 | M, E, Q, S, A, K | Y, H, V, I, R, L, F, G, T, N, W, C | | | |
| 6 | Y, L, I, Q, V, E, T, H, M, | R, F, W, A, G, N, C, S, D | | | |
| | K | | | | |
| 7 | L, F | Y | X | | |
| 8 | A | G, S, Y, W | X | | |
| 9 | W, C, E, S, T, Q, L, F, A, M, | | X | | |
| | R, I, K, Y, H, D, G, V, N | | | | |
| 10 | R, L, I | V, A | | X | |
| 11 | L | M, W, Y | X | | |
| 12 | L, M, Q, E, A, D, F, H, R, Y, | | X | | |
| | N, V, S, G, W, K, I, T, C | | | | |
| 13 | W, L, E, M, I, Q, V, A | K, C, R, S, H, Y, T, D, F, N, G | | | |
| 14 | A | S, C, T, I | | X | |
| 15 | M, I, L | V, W, R, G, A, N, Y, S | X | | |
| 16 | A, R, L, K, E, Q, M, S | I, W, V, T, H, N, D, Y, | X | | |
| | | G | | | |
| 17 | M, A, K, L, V, Q | N, S, Y, I, R, F, C, W, G, D, E | | | |
| 18 | G, N | Q, K, H, C, D | | | X |
| 19 | N, D | S, C, Y, E | | | X |
| 20 | W, M, K, H, D, E, T | A, R, F, I, V, Y, N, L, | X | | |
| | | S, Q, P, G | | | |
| 21 | W, A, L, D, Y, V, Q, E, I, | T, N, C, H, S | | | |
| | R, K | | | | |
| 22 | A, V | L, M, I, S, D | | X | |
| 23 | T, L, I, Q, V, K, M, E, W, | H, S, G, C, R, A, Y | X | | |
| | N | | | | |
| 24 | M, I, A, C, N, E, L, S, Q | V, G | X | | |
| | F, D, T, R, H, K, Y, W | | | | |
| 25 | F, M, I | L, C, A, Y | | | |
| 26 | L, I, V | | | X | |
| 27 | V, I, L | M | X | | |
| 28 | Q, A, G, L, T, H, K, W, S, | V, Y, N, E | X | | |
| | F, R, M, I | | | | |
| 29 | I | A, T, V, L, F, M | | X | |
| 30 | F, Y, I, L, W, A, M, V | Q | X | | |
| 31 | I, Y, L, M, W, V | | X | | |
| 32 | A | G, M, S, W, F | X | | |
| 33 | L, M, Y, F | W, H, I | | X | |
| 34 | E, S, A, D, M, Q, H, I | Y, T, L, G, C, R, V, N | X | | |
| 35 | W, L, M, R, K, A | F, Y, N, V, I, Q, E | X | | |
| 36 | G | L, E, H | | | X |
| 37 | L, W, M | I, E, Y, T, R, K, A, S, | | | X |
| | | F, H, V | | | |
| 38 | I | | | | X |
| 39 | G, T, S, D, A, N | K, L, C, R, Q, E, P | | | X |
| 40 | A, I, D, E, Y, V, S, Q, L, | H, P | | | |
| | N, K, T, M, G, F, C, W, | | | | |
| | R | | | | |
| 41 | V, M, Q, W, I, D, L, F, A, | Y, K, T, E, S, R, N, P | | | |
| | G, H | | | | |
| 42 | Q, M, Y, A, H, E, F, T, V | R, K, L, C, I, D | | | |
| 43 | V, A | L, M, T, F | | | |
| 44 | W, I, M, L, A, E, Y, F, K, | D, N | | | |
| | T, R, Q, G, C, H, V, S | | | | |
| 45 | C, R, A, Y, I, E, D, M, N, | S, Q, F, W, H, G, T | | | |
| | K, V, L | | | | |
| 46 | W, L, E, F | Q, M, Y, N, I, H, C | | X | |
| 47 | I, M, C, L, A | V, F | | | |
| 48 | R, D, E, M, Q, L, A, G, H, | V, C, Y | | | |
| | N, I, W, S, F, K | | | | |
| 49 | L, I, M, Y, V, K, Q, F | T, E, R, H, D, W, A, C, N | | | |
| 50 | A, V | L, M | | X | |
| 51 | E, D, Y | Q, V, R, N | | | |
| 52 | N, A, K, E, Q, D, L, R, I, | S, M, T, C, Y, G, F, V | | | |
| | H, W | | | | |
| 53 | L, M, I | Y, R, Q, W, H, F, D, C | | X | |
| 54 | L, M | D, R | | | |
| 55 | F, M, N, Q, L, D, E, T, S, | V, W, C, G, K, I | | | |
| | A, Y, R | | | | |
| 56 | E, M, Y, Q, G, T, S, A, F, | D, W, I, L, V, P, R, K | | | |
| | C, N, H | | | | |

TABLE 13O
FGFR2_mb8
DIEHLLARAIHRSAQLGDREAVELLTRIFFALEAGKVSEEWAERLARTILEHQRN
(SEQ ID NO: 27)

| | | | | | |
|---|---|---|---|---|---|
| 1 | M, A, Q, I, H, K, F, P, R, E, L, | | | | |
| | D, W, Y, G, T, V | | | | |
| 2 | F, A, N, H, G, L, D, W, S, M, E, | | | | |
| | I, V, Y, R, K, P, T | | | | |
| 3 | S, Q, G, N, Y, T, D, E, M, | K | X | | |
| | A | | | | |
| 4 | A, G, I, K, V, R, P, M, Q, | T, S, E, L | X | | |
| | N, D, F, H | | | | |
| 5 | R, F, I, V, M, N, K, L, E | | | | |
| 6 | I, L, V, M | | X | | |
| 7 | P, Y, G, F, W, S, A | | X | | |
| 8 | K, T, S, L, I, W, A, E, N, V, | | X | | |
| | Q, R, H, F, Y, G, M, D, P | | | | |
| 9 | G, T, Q, I, N, K, F, L, W, R, V, | | | X | |
| | A, M, Y, H, S, E | | | | |
| 10 | M, W, L, Y, F, T, I, S, H | | X | | |
| 11 | M, L, I, W, A, P, D, N, S, | Y, R | X | | |
| | T, V, G, H | | | | |
| 12 | I, Q, A, L, T, H, F, E, N, G, W, | | | | |
| | R, D, V | | | | |
| 13 | M, N, H, F, T, R, Q, A, Y, G, | | | X | |
| | S, L | | | | |
| 14 | W, F, I, V, M, H, D, G, E, | Y | X | | |
| | L, A, R, Q | | | | |
| 15 | E, W, K, N, G, L, Y, A, T, H, D, | | | | |
| | R, M, Q, V, S, I | | | | |
| 16 | W, E, K, N, R, T, Q, A, D, H, G, | | | | |
| | F, L, S | | | | |
| 17 | H, N, D, V, K, Y, A, L, F, S, M, | | | | X |
| | Q, R, G, W, I | | | | |
| 18 | L, N, Q, K, A, R, D, Y | | | | X |
| 19 | F, N, I, H, A, T, V, S, D, | M | | | |
| | K, G, L, W, P, Q, R, E | | | | |
| 20 | G, R, Q, T, A, M, W, V, S, Y, | | | | |
| | I, E | | | | |
| 21 | D, N, T, R, E, V, H, A | S, K | | X | |
| 22 | L, I, M, Q, N, V | | X | | |
| 23 | H, L, F, I, D, S, K, N, T, | G | X | | |
| | E, V | | | | |
| 24 | Y, Q, E, H, N, A, I, S, K, | M | | | |
| | W, V, T, L | | | | |
| 25 | A, I, Y, T, S, V, F, G, L | | | X | |
| 26 | L, D, N, A, M, T, V, Y, S | | X | | |
| 27 | R, K | | X | | |
| 28 | V, G, L, S, I, A, W, M, T | | | X | |
| 29 | F, Y, V | | X | | |
| 30 | L, F | | X | | |
| 31 | G, S, A | | | | |
| 32 | A, M, K, V, H, T, S, Q, R, F, L, | | | | |
| | W, N, I | | | | |
| 33 | I, N, V, K, W, T, S, D, Q, R, E, | | | | |
| | G, Y, L, H | | | | |
| 34 | Y, E, H, G, D, W, N, T, M, R, F, | | X | | X |
| | A, K, S, L, Q | | | | |
| 35 | Q, H, R, E, D, K, T, G, S, N | | | | X |
| 36 | T, M, Q, N, K, A, R, S, H | | | | X |
| 37 | I, F, V, W | | | | X |
| 38 | T, H, P, R, A, S, Q, N, K, G | | | | X |
| 39 | Q, S, A, I, W, F, N, R, E, M, G, | | | | |
| | L, H, D | | | | |
| 40 | D, H, N, S, T, I, F, L, M, G, P, | | | | |
| | Q, K, R, E, V, W | | | | |
| 41 | Y, K, S, H, D, M, E, T, L, A, F, | | | | |
| | R, W, V, I | | | | |
| 42 | S, V, G, A | | | | |
| 43 | A, G, N, H, Q, R, D, E, T, F, Y, | | | | |
| | W, I, V | | | | |
| 44 | S, G, T, H, N, E, A, M, L, | P, K, W, I, R, Y | | | |
| | F | | | | |
| 45 | Q, S, A, N, I, M, R, E, H, | K | | | |
| | V, G, F, L, W | | | | |
| 46 | I, V, T, F, S, Y, L, G, A, H | | | X | |
| 47 | L, E, W, S, M, D, A, R, I, Q, Y, | | | | |
| | G, K, V, N | | | | |
| 48 | D, G, Q, E, K, S, L, T | R, H, V | | | |
| 49 | T, V, W, A, L, Q, N, G, S, R, H, | | | X | |
| | K, I, E, M, Y | | | | |
| 50 | S, F, E, N, I, P, D. H., G, V, M, | | | | |
| | W, Q, A, L, R, T, K, Y | | | | |
| 51 | D, V, W, I, T, H, Q, P, N, G, L, | | | | |
| | E, Y, R, F, M, K | | | | |
| 52 | Q, N, K, R, A, S, E, M, G, T, V, | | | | |
| | L, W, I, P, Y, F, H | | | | |
| 53 | G, N, S, E, K, P, I, Y, A, | D, F, L, T, V, Q, H | | X | |
| | M | | | | |
| 54 | D, E, Q, A, I, T, H, M, F, | L, S, Y, G, W, N, K | | | |
| | R | | | | |
| 55 | P, F, T, K, D, L, W, M, R, Y, I, | | | | |
| | A, V, N, G | | | | |

TABLE 13P
FGFR2_mb9
SLVERVIEQVEKRGLPPEALVLTVWLALVKAGDPEKARLVEELAREVFEGKLPPEELKRLLREIE
(SEQ ID NO: 28)

| | | | | | |
|---|---|---|---|---|---|
| 1 | T, R, G, H, S, Y | K, W, N, M, F, P, D, A | | | |
| 2 | Y, W, M, G, F | L, S, N, T, A, I | X | | |
| 3 | V, L | I, W | | X | |
| 4 | E | D, H, N, Q | | | |
| 5 | Y, W, N, F, H, S, M, D, E | G, A, Q, L, T, R, I, V | X | | |
| 6 | F, Y, L, T, M | I, V, D, A, R | | X | |
| 7 | I | S, L | | | |
| 8 | W, D, E, S | Q, N, F, H, Y, M, A, L | | | |
| 9 | E, Q, D | S, F | X | | |
| 10 | I, M, V | Q, L, G, H | | X | |
| 11 | E, D | W, A | | | |
| 12 | S, M, R, G, T, W, F, N, E, | D, Q, Y, L, A, K, I, V | | | |
| | H, P | | | | |
| 13 | M, E, D, A, N, Q, L, H, T, | V, F, R, Y, I | X | | |
| | G, K, S | | | | |
| 14 | G | D, H, E, Y | | | X |
| 15 | F, L | D, A, S, Q | X | | X |
| 16 | G | S, P, R, A, T, N, H | | | X |
| 17 | Y, P, I, G, M | S, A, H, Q, E, V | | | |
| 18 | A, Y, I, S, M, H | E, W, F, T, R, Q, G, K, | X | | |
| | | L | | | |
| 19 | S, T | A, H, Q | X | | |
| 20 | I, A | L, S, V | | | |
| 21 | V, F | N, P, W | | | X |
| 22 | Y, M | L, S, T, V, W, F, A | X | | |
| 23 | T | S | X | | |
| 24 | I, V | Y, M | | X | |
| 25 | Y, F, W, D | | X | | |
| 26 | Y, F | L, V | X | | |
| 27 | G | A, V, W, T | X | | |
| 28 | Y, H, W | F, L, M, N, I, A, S | | X | |
| 29 | T | V, K, Y, H, E, L, A, I, | X | | |
| | | F, M | | | |
| 30 | K | H, E, N, R, L, M | X | | |
| 31 | G, Y, H, F, W, S | K, A, M, V, N, D, R, I, Q, L | | | |
| 32 | G, S | N, D, V | | | X |
| 33 | H, W, Y, M, Q, L, I, R | K, N, F, D, S, A, E, T | | | X |
| 34 | N, D, E, A, G, Q, F, H, P | S, L, V, K, M, T, I, R, W | | | |
| 35 | Y, V, Q, R, E, W | H, N, M, A, I, D, T, L, S, K, F | | | |
| 36 | N, R, K | D, T, I, G, Y, M | | | |
| 37 | A, V | K, P, M, T | | | |
| 38 | D, Y, Q, N, A, M, G, S, F | H, W, T, R, E, L, I, V, K | | | |
| 39 | K, V, E, D, W, H, R, Q, Y, | L, I, S, N, M, T | | | |
| | A, F | | | | |
| 40 | V | A | | X | |
| 41 | E | S, N, D | X | | |
| 42 | D, Q, L | G, N, E, M, I, S, T, K, Y, A, P | | | |
| 43 | W, Y | L, M, I, T, S, V | | X | |
| 44 | S, F, W, Y | H, A, G | X | | |
| 45 | R, K, I | Q, G, W, H, N | X | | |
| 46 | L, Q, K, R, M, S, N | A, E, H, G, F, Y, W | | | |
| 47 | V | T, L, W, H, Y | | X | |
| 48 | F | | X | | |
| 49 | M, K, R, A, V, S, Q, L, T | G, N, I, E, D, Y, F, W | X | | |
| 50 | G | Y, V, H, N, T, D | | | X |
| 51 | T, R, N, K | Q, A, M, I, H, S, E | | | X |
| 52 | I, L | M, V, W, H, K, G | X | X | |
| 53 | A, Q, G, L, E, H, R, S | W, P, V, K, D, N, Y, T, I, M, F | | X | |
| 54 | M, W, Y, N, F, L, Q, T, I, | P, V, A, E, D, S, K | | | |
| | H, G | | | | |
| 55 | D, A, E, L, W, N, P | H, Y, Q, S, M, I | | | |
| 56 | R, E, Q, T | V, K, N, H, I, G, A, D, L | | | |
| 57 | L, M | S, A, I, H | | X | |
| 58 | K | I, L, S, Y, R, N, Q, W | | | |
| 59 | R, S, Y, F, V, Q, A | N, K, H, M, L | | | |
| 60 | S, K, M, A, R, E, L, I, V | N, Q, T, H, W | | | |
| 61 | L | M, T, A, F | | X | |
| 62 | R, N | Q, L, Y, S, T, H, F, V | | | |
| 63 | G, L, E, M | K, S, R, D, T, I, V, N, H | | | |
| 64 | L, F | M, I, Q, V, T, E, A, D | | X | |
| 65 | Q, T, I, L, F, K, M, V, H | N, P, A, R, S, E, D, G, Y | | | |

TABLE 13Q
FGFR2_mb10
DEVHHFLLRLFFKDPDDEDVERILALFLLLKKEGIPPEEVTEIVIKFAEKLGNPELAKELKKILK
(SEQ ID NO: 29)

| | | | | | |
|---|---|---|---|---|---|
| 1 | A, M, D, Q, S, G, W, E, P, | I | | | |
| | L | | | | |
| 2 | N, S, P, Q, Y, E, H, F, G, M, V, I, | | | | |
| | R, T, D, W, K, L | | | | |
| 3 | V, I, M, F, L, T, A, G | P, S | | X | |
| 4 | W, H, A, S, L, M, Y, E, N, | P, V | X | | |
| | Q | | | | |
| 5 | Y, H, T, F, N, M, V, I, S | R | | | |
| 6 | F, Y, H, W, L | M | | | |
| 7 | L | | | X | |
| 8 | L, I | V | X | | |
| 9 | R | G | X | | |
| 10 | L, M, K, V, Y, W | A, N | | | |
| 11 | F | | X | | |
| 12 | F | V | X | | |
| 13 | Y, K, M, W, A, H, S | | | | |
| 14 | D, A, N, E, K, Q, T | H | | | X |
| 15 | P, T, V | | | | X |
| 16 | F, N, Q, R, W, D, M, A, K, | H | | | X |
| | L, G, E | | | | |
| 17 | A, D, E, N, Q | | | | X |
| 18 | D, I, H, R, E, Y, Y, L, N, V, | M | | | |
| | K, G, P, A, F, S | | | | |
| 19 | G, N, S, D, T, Q, E, L, M, | F, K | | | |
| | Y, V, H, A, R, I | | | | |
| 20 | M, V, H, I, N, T, A | L, Y, K | | | |
| 21 | E | | X | | |
| 22 | A, D, G, K, Q, S, R, M, N, | E | | | |
| | Y, H | | | | |
| 23 | M, I, L, V, A, G, S | T | | X | |
| 24 | L, F | | X | | |
| 25 | A, N, S, V | | X | | |
| 26 | L, A, W, G, Q, D, R, M, T, H, I, | | | | |
| | E, F, Y | | | | |
| 27 | A, N, T, F, M, V, G, D, I, | | | X | |
| | S, H, L | | | | |
| 28 | Y, L, M, F, W | | X | | |
| 29 | M, L, Q, N, V, G, E, W, I, | F, A, D, R | X | | |
| | T | | | | |
| 30 | G, L, N, E, I, V, W | D, T, F | | X | |
| 31 | H, N, W, Y, K, M, F, G, P, | E, D | | | |
| | Q, V, R, T, S | | | | |
| 32 | G, F, H, M, N, Q, W, K, Y, | S | X | | |
| | R, I, T, E, V, L | | | | |
| 33 | P, E, R, D | Q | | | X |
| 34 | D, F, Q, S, R, G, P, A, K, | N | X | | X |
| | L, I, Y, M, T | | | | |
| 35 | G, I, Q, W , K, H, A, R, N, T, | | | | X |
| | L, P | | | | |
| 36 | A, T, R, N, E, P, D, S, F, | M | | | X |
| | Y, V, I, H, Q, W, L, G | | | | |
| 37 | A, G, H, Q, T, Y, P, K, M, | I | | | |
| | V, F, L, W, E | | | | |
| 38 | H, M, L, Q, R, W, E, T, F, | A, N | | | |
| | V, S, D, I, P, K, G | | | | |
| 39 | E, Y, D, L | G, W, I, N, M | | | |
| 40 | N, V, Q, R, H, L, W, Y, E, | F, A, M | | | |
| | K | | | | |
| 41 | M, L, R, T, F, E, E, D, A, | Q, N, S, G | | | |
| | H, Y, K, W | | | | |
| 42 | I, M, E, N, G, Q, S, D, A, | H, W | | | |
| | Y, F, R, P, L | | | | |
| 43 | K, L, I, M, N, W, Y, V, E, | G, F, A, D | | | |
| | P, Q | | | | |
| 44 | T, V, G, L | I, S | | X | |
| 45 | A, K, L, V, I, H, W, S, G, | M, T, F | | | |
| | R | | | | |
| 46 | A, F, H, M, R, Y, K, D, S, | G | | | |
| | Q, I, P, L, N | | | | |
| 47 | H, L, F, S, Y, K, R, Q, V, | W | | | |
| | T, I, A, N, M | | | | |
| 48 | T, A, I, V, G, L | E, S | | | |
| 49 | A, T, R, M, N, I, E, L, V, | H | | | |
| | K, S, Y, W, D, Q, F, G | | | | |
| 50 | G, K, D, H, R, L, M, A, Y, | | | | |
| | P, Q, S, E, T, N | | | | |
| 51 | F, N, L, D, V, I, Q, K, M, | G, S, W | | X | |
| | Y, H, E | | | | |
| 52 | P, S, T, W, Y, G, V, A, L, | F | | | X |
| | K, E, M, N, H | | | | |
| 53 | F, H, K, Y, N, W, P, V, L, | | | | X |
| | R, I, M, T, S, E | | | | |
| 54 | P, D, Q, L, I, S, Y, W, A, | M | | | |
| | T, R, K, E, G, F, V, N | | | | |
| 55 | G, M, T, V, E, Q, R, L, Y, | F, H | | | |
| | K, D, W, N, P, A | | | | |
| 56 | I, L, R, P, A, Y, H, V, M | K, T, W | | X | |
| 57 | G, L, Q, R, A, S, M, T, N, | P, V, D, I | | | |
| | F, K, Y | | | | |
| 58 | G, N, T, K, A, F, I, V, R, | Q, H, Y, S, W | | | |
| | L, M, E | | | | |
| 59 | M, E, Y, Q, S, K, F, H, G, | T | | | |
| | I, N, P, D, R, W, A | | | | |
| 60 | L, I, M, V | | | X | |
| 61 | G, Y, K, I, W, T, E, L, Q, | D | | | |
| | S, F, A, N, R, V | | | | |
| 62 | A, E, F, R, V, K, W, L, I, | M, Y | | | |
| | S, G, D, N, T | | | | |
| 63 | L, R, P, Q, Y, K, I, F, G, | W | | | |
| | E, H, M, A, D, V, N, T | | | | |
| 64 | F, Y, L, G, A, E, T, M, K, | H, W | | | |
| | Q, D, V, R, S, I | | | | |
| 65 | D, K, S, V, M, Y, H, E, W, | T, N | | | |
| | G, P, L | | | | |

TABLE 13R
H3_mb1
SQHEKFLEWMLRKIEEAIKRGNKISAEFLINLAKNFIHVLGDDEIRRRLERLERQLH
SEQ ID NO: 645

| | | | | | |
|---|---|---|---|---|---|
| 1 | S, T, N, R, P, K, H, G, L, | D | | | |
| | I, V, Q | | | | |
| 2 | Q, R, A, P, K, G, S, E, N, | H, F | X | | |
| | T, M, D | | | | |
| 3 | R, Q, H, K | F | X | | |
| 4 | K, A, R, F, H, Y, N, E, D, | L | | | |
| | S, G, T, Q, V , M | | | | |
| 5 | K, Q, A, L, N, M, R, I, H, | G | | | |
| | E, V, T | | | | |
| 6 | F | H, K, P, A | X | | |
| 7 | M, L, R, F, K, H, N | Q, S, D, T | | | |
| 8 | I, W, Y, R, F, M, N, G, Q, | P | | | |
| | V, K, H, E, L, S, A, T, | | | | |
| | C, D | | | | |
| 9 | W | | X | | |
| 10 | L, M, I, H | N, F | X | | |
| 11 | L, I, M, H, V, N, Q | A, C, R | | | |
| 12 | R, K, S, N, H | G, Y, C | | | |
| 13 | K | P, H, T | X | | |
| 14 | I, T, L, V, A, G, C | | | X | |
| 15 | F, K, R, Q, I, L, Y, N, A, V, E, | | | | |
| | T, S, H, D, W, C, G, M | | | | |
| 16 | A, V, M, S, I, L, T, N, E, | H, C, R, W | | | |
| | Q, D, G, F, Y | | | | |
| 17 | A, N | S, R, T, Q | | X | |
| 18 | F, Q, I, G, M, V, R, Y, N, L, | | | | |
| | H, S, C, W, E, K, T, D, A | | | | |
| 19 | R, K, N, V, Q, T, A, Y, G, | L, W, M | | | |
| | I, E | | | | |
| 20 | R, K | | X | | X |
| 21 | N, K, R, G, T, Q, S | M, H, A, E, P, D, F | | | X |
| 22 | N, R, Q | H, S, K, F, V, C | X | | X |
| 23 | R, K | A, H, E, P, Q | X | | |
| 24 | L, I, M | K, F | X | | |
| 25 | S | | X | | |
| 26 | A, G, Y, S, T, Q | | | X | |
| 27 | D, N, E | | | | |
| 28 | W, F, T | Y, S | X | | |
| 29 | L | Y, V | X | | |
| 30 | I, V, Q, T, A, S, C, G | L, M, Y | | | |
| 31 | G, N, T, P | C | | | |
| 32 | N, Q, L | T, S, C, W, P | X | | |
| 33 | Y, A, S, F, W, H, C | T, G | | X | |
| 34 | F, I, M, V, W, A, G, S, T, R, K, | | | | |
| | H, N, P, Q, D, E, Y, C | | | | |
| 35 | R, K, G, N, Q | S, T, D | X | | |
| 36 | F | | X | | |
| 37 | S, I, N, L, M, V, A | T, G, F, C, Q, H | | X | |
| 38 | R, N, S, G, H, T, Q, I, K | L, W | | | |
| 39 | P, Q, G, V, S, R, A, N, T | K, H, E | X | | |
| 40 | T, K, P, Q, E, N, H, L, D, | C, W, S | | | X |
| | R, V, G, I, A | | | | |
| 41 | K, Q, L, D, H, R, G, S, N, | F | | | X |
| | T, A, E, V, W, Y, C | | | | |
| 42 | H, Y, F, I, D, N, Q, E, K, R, | | | | X |
| | S, T, M, A, L, G | | | | |
| 43 | Q, Y, T, I, A, N, K, M, D, V, | | | | |
| | S, G, R, F, C, L, W, H, E | | | | |
| 44 | W, R, Q, H, G, Y, K, M, P, E, | | | | |
| | V, F, A, D, N, L, I, T, C, S | | | | |
| 45 | K, I, H, M, V, P, R, Y | T, D | | X | |
| 46 | K, A, R, S, E, H, T, M, I, | F, D, C | | | |
| | N, Q, G, L, Y, W, P, V | | | | |
| 47 | K, T, A, Y, R, N, L, W, I, | S, G, D, C, Q, E | | | |
| | V, M, F | | | | |
| 48 | R, Y, F, K, S, W, H, Q, N | | | | |
| 49 | L, T, A, V, F | G, Q | | X | |
| 50 | I, N, E, W, G, S, A, H, Y, | P | | | |
| | K, T, F, V, L, D, M, R, | | | | |
| | Q, C | | | | |
| 51 | I, R, E, K, G, H, W, S, A, | C, Y, V, D | | | |
| | L | | | | |
| 52 | M, S, L, F, Y, W, H, A, Q, | D | | X | |
| | N, V, C | | | | |
| 53 | E, Q, G, I, D, V, T, N, H | S, M, L, R | | | |
| 54 | H, R, S, I, D, K, P, M, E, W, A, | | | | |
| | T, V, Y, G, F, N, L | | | | |
| 55 | W, M, V, I, Y, K, N, R, F, L, | | | | |
| | S, A, T, Q, G, H, P, E, D | | | | |
| 56 | F, V, R, P, L, G, M, Y, K, | D | | | |
| | S, Q, W, C, I, T, A, N, | | | | |
| | E, H | | | | |
| 57 | G, W, P, H, E, D, Q, A, F, V, | | | | |
| | N, R, T, Y, S, M, L | | | | |

TABLE 13S
H3_mb2
TEEEIEEVEELLKKATDPKLRHMLEFLLRRLREALERNNLLSARFLLGLARQFYKSI
(SEQ ID NO: 646)

| | | | | | |
|---|---|---|---|---|---|
| 1 | H, K, S, R, A, G, Q, T, N, E, V | P, Y, D, C, I, W, L | | | |
| 2 | N, R, Y, G, H, A, S, Q, K, P, F, W, L, | | | | |
| | I, T, C, V, E, D, M | | | | |
| 3 | P, H, G, K, V, S, T, I, D, A, R, E, Q, | L, C | | | |
| | N, W, M, Y, F | | | | |
| 4 | F, M, P, Y, A, H, W, Q, N, T, C, S, V, | G | | X | |
| | R, E, I, K, L, D | | | | |
| 5 | L, I, S, A, V, T | Y, C | | | |
| 6 | L, R, I, Q, K, M, E, V, H, Y, F, G, A, | | | | |
| | C, T, S, N, D, W | | | | |
| 7 | E | | | | |
| 8 | V | | | X | |
| 9 | K, E, V, S, T, R, L, N, A, Q, M | I, C | | | |
| 10 | G, R, M, A, T, Q, E, H, C, S, D, N, L, | W, K, F | | | |
| | I, V, Y | | | | |
| 11 | M, K, S, N, F, L, Y, Q, W | R, H, A | | X | |
| 12 | L, Y, H | | | | |
| 13 | R, K, H, E, I, S, N, Q, A, Y, F, G, M, | W, V, T, C | | | |
| | L, D | | | | |
| 14 | T, N, K, R, S, Q, H, M, A, G, C | D | | | |
| 15 | A | | | X | X |
| 16 | R, T, P, N, H, K, V, E, Y, Q, M, S, A | F, I, D, G, W | | | X |
| 17 | R, Q, T, N, H, S, A, K, M, E, Y, D, V | P, I | | | X |
| 18 | R, S, Y, P, N, I, H, T, V, L, W, Q, A, | | | | |
| | K, G, E, M, F, D | | | | |
| 19 | Y, W, K, R, Q, H, P, N | T,F | X | | |
| 20 | K, Q, R, L, M | V | | | |
| 21 | I, R, K, V, Q | T, M | | | |
| 22 | N, A, E, S, D, G, Q, H, T, R, K, L | I, M, V | X | | |
| 23 | M | L | X | | |
| 24 | L | | | X | |
| 25 | E, S, M, T, I, Q, H, A, G, R, N, V | D, K, L, Y | | | |
| 26 | F | | X | | |
| 27 | L | | | X | |
| 28 | L, K, H | R, Q, C | | | |
| 29 | K, R, M, V, T, I | S, L, Q | | | |
| 30 | R | | X | | |
| 31 | L | | | X | |
| 32 | R, K | H | | | |
| 33 | T, Q, K, S, A, V, I, R, L, G, M, E, N, | D, P | | | |
| | W, F, H, Y | | | | |
| 34 | A | S | | X | |
| 35 | K, H, F, M, N, L, R, V, Y, S, Q, I, C | A, G, T | | | |
| 36 | R, A, K, S, F, Y, Q, V, G, N, T, M, E, | C | | | |
| | L, H, I, D, W | | | | |
| 37 | R, K | | | | X |
| 38 | K, H, R, N G, Q | S | | | X |
| 39 | R, N, K, S | H | X | | X |
| 40 | K, R, M, Q, L, Y, H, T, A, V, P | S, I | X | | |
| 41 | L | | X | | |
| 42 | S | | X | | |
| 43 | A, I, F, V, M, H, Q, L | T, S | | | |
| 44 | R, N, Q | H, S | X | | |
| 45 | F | W | X | | |
| 46 | L | | X | | |
| 47 | L, Y, G, I, S, T, V | M | | | |
| 48 | G | N | | | |
| 49 | L | | X | | |
| 50 | A | | | X | |
| 51 | R, H, Q | | | | |
| 52 | N, Q, H, S, T, G | R | X | | |
| 53 | F | | X | | |
| 54 | A, T, G, S, N, Y, E, V, C, | Q | | | |
| 55 | W, G, S, K, Q, N, Y, R, T, F, A, M, H | | | | |
| 56 | N, A, G, S | R, K, Q | X | | |
| 57 | R, Q, N, S, A, M, K, T, H, G, V, I, E, | P, L | | | |

D

TABLE 13T
H3_mb3
TRMRISVKFLLGLARQFTDPRIREWLLRRAERLAREGNDPELEELVRRVEEELK
(SEQ ID NO: 647)

| | | | | | |
|---|---|---|---|---|---|
| 1 | Y, N, E, D, S, R, Q, K, G, A, T, H, W, I, M, P, | L | X | | |
| | V, F | | | | |
| 2 | K, M, L, R, T, H, N, S, F, I, V | Q, A | X | | |
| 3 | V, I, T, Y, R, L, M, H, A, K, W, Q, F, N, E, S | D, G | | | |
| 4 | A, W, H, T, K, F, M, R, Y, Q, E, L, G, S, D, I, | V | X | | |
| | N | | | | |
| 5 | N, S, K, A, R, T, M, Q, D, P, E, H, G, I, L, V | Y, F | X | | |
| 6 | K, Q, M, F, A, R, S, L, V | I, H, P, Y, T | X | | |
| 7 | I, L, V | M | | X | |
| 8 | E, N, Q, D, K, S, G, R | H, T, M | | | |
| 9 | F, W | | X | | |
| 10 | L, T, I | | X | | |
| 11 | L, I, M | | | | |
| 12 | Q, H, K, R, I, S, G, T, L, D, N, Y, M, A, V | | | | |
| 13 | M, L, I, V | | X | | |
| 14 | T, C, A, V | S, Y | | X | |
| 15 | K, R, S, G, Q, H, A, N | | | | |
| 16 | K, R, N, S, Q | T, G, A | | | |
| 17 | F | | X | | X |
| 18 | R, L, K, V, T, I, M, Q, H, A, S, F, G, N, W, E | | X | | X |
| 19 | D | | X | | X |
| 20 | L, W, A, Q, K, V, R, T, P, N, D, I, H, G, F, Y, | C | | | |
| | M, S, E | | | | |
| 21 | I, V, A, L, H, R, P, N, M, T, K, Q | D, S | X | | |
| 22 | N, S,T, Q, I | D, V | X | | |
| 23 | Q, R, K, S, V, A, I, T | | | | |
| 24 | Y, W, H, I, L, M, T, N, V, E, D, F, A, S, Q, G, | | | | |
| | R, K | | | | |
| 25 | W | | X | | |
| 26 | L, I | | X | | |
| 27 | F, I, V, Y, C, M, L | W | | | |
| 28 | R, K, L, H, M, T, I, N, V, G, S, Q, A | | | | |
| 29 | R | | X | | |
| 30 | A | | | X | |
| 31 | W, F, M, Y, I, D, L, C, A, Q, H, E, R, T, S, G, | N, K | | | |
| | V | | | | |
| 32 | A, R, N, M, S, K, L, H, V, T, G | | | | |
| 33 | L, V, I, M, K, R, E, C, T | | | X | |
| 34 | A, T, V, C, L, S, I | | | X | |
| 35 | H, Q, W, S, T, M, R, C, F, V, I, N, G, Y, L, K, | D | | | |
| | A, E | | | | |
| 36 | D, S, T, G, A, E, Q, N, L, M, V, H, I | K, F, Y, R | | | |
| 37 | A, S, G, F, V, I, H, C, T, N, Y, W | | | | X |
| 38 | H, M, G, Q, R, N, S, A, P, L, F, K, E, V, C, D, | | | | X |
| | I, Y, T, W | | | | |
| 39 | E, M, S, C, D, A, Y, H, I, R, V, Q, T, K, F, W, | | | | X |
| | N, L | | | | |
| 40 | R, H, N, P, S, K, W, A, Q, T, Y, G | V, C | | | |
| 41 | W, V, K, D, E, A, G, Q, I, N, C, H, T, L, P, S, | | | | |
| | Y, R, M, F | | | | |
| 42 | C, Y, T, A, S, V, F, M, L, I | W, H | | X | |
| 43 | Y, L, T, M, V, W, F, S, C, D, N, A, H, E, I, G, | | | | |
| | R, P, Q, K | | | | |
| 44 | A, C, S, N, G, L, E, T, I, M, Y, D, F, K, W, H, | | | | |
| | R, Q, V | | | | |
| 45 | D, A, M, H, E, W, G, C, Y, Q, V, K, N, L, T, R, | | | | |
| | F, S, I | | | | |
| 46 | I, V, T, C | | | X | |
| 47 | K, M, S, T, L, W, A, R, V, Y, G, N, H, F, C, Q, | D | | | |
| | I, E | | | | |
| 48 | Q, H, S, R, D, A, G, M, N, K, C, L, V, I, F, T, | | | | |
| | Y | | | | |
| 49 | R, K, Q, N, Y, E, W, S, C, A, H, M, V, D, T, F | I, L | | X | |
| 50 | R, A, K, H, E, G, Y, W, M, D, N, V, T, S, F, Q, | | | | |
| | C | | | | |
| 51 | K, V, T, A, F, M, N, Q, W, G, E, I, R, Y, C, D, | | | | |
| | L, H, S | | | | |
| 52 | A, N, D, T, S, K, Q, E, G, H, R, V | | | | |
| 53 | L, M, Y, N, W, I, T, V, F, H, E, Q, D | | | X | |
| 54 | L, I, T, Q, R, F, H, M, K, S, D, V, A, G, E, W, | | | | |
| | N, C, Y | | | | |

TABLE 13U
H3_mb4
SKVKLSVKFLLGLARQFYRAGNPEAAEYLIKRAKEIAEKNNNEELRKEIEELEREIR
(SEQ ID NO: 648)

| | | | | | |
|---|---|---|---|---|---|
| 1 | P, Y, N, T, A, I, G, V, E, Q, M, S, R, L, W, | | X | | |
| | K, H, F, D | | | | |
| 2 | L, Q, R, K, M, F | H | X | | |
| 3 | V, T, E, H, D, Q, P, M | W | | | |
| 4 | S, R, K, M, I, W, L, G, T, E, N, H, V, Y, Q, | | X | | |
| | F, D, A, P, C | | | | |
| 5 | A, R, K, M, L, V, G, Q, S | T, I | X | | |
| 6 | K, Q, R, M, S | T, H, I, A | X | | |
| 7 | V | | | X | |
| 8 | H, K, Q, V, N, I , D, R | T, E | | | |
| 9 | F, I | | X | | |
| 10 | L | | X | | |
| 11 | M, C, L, I, T, N | Q | | | |
| 12 | M, Q, G, A, Y, T, R, K, L, N, P | S, I | | | |
| 13 | M, L | V | X | | |
| 14 | A | H, G, V | | X | |
| 15 | G, R, K, M, N, A | L, Q, S, H | | | |
| 16 | R, Q | A, S, G | X | | |
| 17 | F | | X | | |
| 18 | K, A, Q, E, S, E, Y, C, H, N, V, W, D, M, I | L | | | |
| 19 | R, K, I, S | F | | | |
| 20 | K, A | G, R, V | X | | X |
| 21 | M, N, S, R, K, G, Q, L, H, A, C, E, D, Y, I, | | | | X |
| | P | | | | |
| 22 | S, Q, N, A | | X | | X |
| 23 | P, Q | G, F, M | | | |
| 24 | P, F, Y, I, V, W, H, A, E | M, Q, C | | | |
| 25 | N, S, A | D, L | X | | |
| 26 | F, A, E, T, S, K, V, G, C, H, Y | W | | | |
| 27 | I, M, G, L, V, E, Q, H, W, R, S, C, A, F, T, | | | | |
| | N | | | | |
| 28 | W, Y | | X | | |
| 29 | L | | X | | |
| 30 | A, I, T, S, C, L, V, W, Y, R, M, G | Q, F | | X | |
| 31 | K, S, L, Y, N, A, G | M, D, T, V, I, W | | | |
| 32 | R | | X | | |
| 33 | A | G | | X | |
| 34 | A, W, K, L, I, V, M, R, N, C, Y, G, F, S, E, | | | | |
| | H, D, Q | | | | |
| 35 | N, Q, D, V, M, T, K, E, S, R, H, L | I, F | | | |
| 36 | C, L, I, M, V, E, A, W, N, S, R, K | | | X | |
| 37 | I, V, T, A, E, C | L | | X | |
| 38 | V, W, D, F, T, C, E, N, H, L, M, A, I, R, S | Q, G | | | |
| 39 | V, I, K, R, H, Q, T, N, G, F, Y, D, A, L, M, | C | | | |
| | W, S, E, P | | | | |
| 40 | A, F, N, H, S, V, Y | Q, D, T | | | X |
| 41 | A, D, R, V, Q, N, S, L, E, T, H, K, Y, C, I, | | | | X |
| | F, G, M | | | | |
| 42 | D, N, H, I, L, R, S, T, V, F, M, A, C, Y, G, | | | | X |
| | K | | | | |
| 43 | S, W, A, C, I, T, P, G, Q, E, M, H, N, L, K, | | | | |
| | V, R, Y, F, D | | | | |
| 44 | Q, S, E, P, G, A, N, D, F, Y, I, M, R, V, H | C, W, L | | | |
| 45 | M, L, C, I, E, D, Q | F | | X | |
| 46 | S, L, T, Q, V, R, I, Y, M, C, K, G, A | | | | |
| 47 | I, M, V, K, Y, G, W, A, D, S, F, C, Q, T, N | | | | |
| 48 | R, V, M, P, I, D, Y, N, C, E, K, Q, S, L, F, | | | | |
| | W, H, A, G, T | | | | |
| 49 | S, C, T, I, V | A, Y | | X | |
| 50 | N, Q, Y, F, M, E, G, H, I, L, K, W, C, V, D | | | | |
| 51 | H, A, Q, K, M, S, R, L, P, E, Y, W, I, F, V, | | | | |
| | N, G, T | | | | |
| 52 | V, A, R, Q, F, L, N, T, W, K | D, E, I | | X | |
| 53 | R, Y, Q, I, V, C, E, L, P, N, F, M, K, G, A, | | | | |
| | S, W, H, T | | | | |
| 54 | F, A, W, L, R, Q, H, P, E, G, M, Y, D, S, T, | | | | |
| | N, K, I | | | | |
| 55 | S, R, G, K, M, N, E, V, I, T, L, D, Y, C, W, | | | | |
| | F, Q | | | | |
| 56 | K, Y, L, N, Q, F, I, S, R, A, P, W, M, T | E, V | | X | |
| 57 | L, S, I, D, F, N, R, M, G, T, K, C, Q, W | E | | | |

TABLE 13V
H3_mb5
SERNEHLLRWLLEKIRKSTNEISLRFLLGLLEQFARAAGTEEAREILREAEEIVK
(SEQ ID NO: 649)

| | | | | | |
|---|---|---|---|---|---|
| 1 | R, V, K, T, S, A, I, H, G, E, Y, N, W, Q, M, D, P, L | | | | |
| 2 | A, G, N, T, W, I, V, E, R, M, P, Q, F, H, K, Y, L, D, S | | | | |
| 3 | R, H, A, N, Y, Q, G, P, I, E, S, K, W, T, M | | X | | |
| 4 | G, R, K, N, D, S, V, E, Q, H, L, P, T, Y, A, I | | X | | |
| 5 | A, G, H, F, T, L, S, N, E, Y, I, V, K, Q, R, W, D, P, M | K, W | | | |
| 6 | M, R, Q, G, I, H, L, T, D, P, N, E, A, V, S, F, Y | | X | | |
| 7 | H, M, F, N, L, Q, G, S, P | | X | | |
| 8 | L, C, M, A, H, T, S, Q, I, W, P, F, Y, G | | | X | |
| 9 | N, A, V, L, R, Y, I, H, K, F, E, M, T, G, W, S, C, D, Q | | | | |
| 10 | H, Y, W, F | | X | | |
| 11 | L, V, I, M | | X | | |
| 12 | K, L, Q, V, R, M, A, T | | | | |
| 13 | W, I, L, S, R, E, M, K, V, T, C, A, H, N, F, D, Q, Y, G | | | | |
| 14 | K, R, N, H, S, G, A | | X | | |
| 15 | I, L, M | | | X | |
| 16 | R, V, I, S, T, M, Y, L, K, A, Q, E | | | | |
| 17 | R, K, G, Y, H, F, I, Q, N, V, M, S, A, L, W, T, D | | | | |
| 18 | A, S, T, Q, K, V, R, H, G | | | X | X |
| 19 | A, T, V, P, Y, I, M, N, K, Q, S, E, R, H, D | | | | X |
| 20 | A, N, R, K, G, T, S, H, L, E, Q | | X | | X |
| 21 | I, K, Q, H, R, V, E, M, F, D, P, G, A, W, Y, N, L, T, S | | X | | |
| 22 | I, G, M, V, T, S, A, L, Q, N | | X | | |
| 23 | A, G, S, Q, N, T, P | | X | | |
| 24 | K, Q, R, H, F, S, L, G, V, I, C, T, A, M, Y, N | | | | |
| 25 | K, R, H, Y, S, L, F, I, N, M | | X | | |
| 26 | Y, W, F | | X | | |
| 27 | Q, N, L, V, C, M | | X | | |
| 28 | R, S, A, K, L, Q, I, G, F, W, M, T, N, H, C, Y, V | | | | |
| 29 | N, R, G, T, H, K, A, S | | | | |
| 30 | R, N, S, Q, H, T, W, L, I, V, A, M, P, E, C | | X | | |
| 31 | C, L, T, M, V, A, I, Q | | | X | |
| 32 | T, H, Q, D, K, G, E, V, R, M, S, F, L, N, I, W, A, Y, C | | | | |
| 33 | R, G, K, N, Q, P, T, S | | X | | |
| 34 | F, Y, W | | X | | |
| 35 | A, G, C, S, Q, V, N, T, H, I | | | | |
| 36 | R, G, V, I, D, M, Y, T, C, N, E, Q, K, A, S, W, H, F, L | | | | |
| 37 | T, R, A, S, N, G, V, P, Q, K | | X | | |
| 38 | H, P, Q, R, K, A, S, T, M, W, D, G, N, F, Y, C, E, I | V | | X | |
| 39 | P, A, W, K, R, I, Y, S, Q, N, H, L, T, G, E, V, D, F, | | | | X |
| | M, C | | | | |
| 40 | K, H, A, R, Q, T, N, E, G, D, P, V | | | | X |
| 41 | R, F, M, T, C, L, P, Y, E, G, V, W, H, Q, A, D, S, K, | | | | |
| | N, I | | | | |
| 42 | I, V, K, F, L, M, A, W, H, C, R, P, S, T, Y, N, G, E, | | | | |
| | D, Q | | | | |
| 43 | G, A, T, R, S, N, V, H, K, Y, C | | | X | |
| 44 | Y, G, R, H, N, E, S, D, L, T, P, C, K, F, V, I, Q, M, | | | | |
| | W | | | | |
| 45 | Y, W, N, K, F, E, D, V, L, T, C, M, I, H, A, R, S, Q, | | | | |
| | P, G | | | | |
| 46 | K, T, Y, H, R, I, S, L, A, C, F, V | | | X | |
| 47 | M, I, Q, N, C, H, F, R, V, K, L, S, A, Y, T, E, W, G | | | | |
| 48 | N, D, Q, F, M, E, Y, C, L, R, G, T, A, W, H, K, S, I, | | | | |
| | V | | | | |
| 49 | R, K, Y, S, C, L, E, I, N, H, Q, T, A, G, D, V, M | F | | | |
| 50 | S, A, T, C, G, K | | | X | |
| 51 | K, F, Y, I, R, G, H, L, A, E, W, T, S, D, M, Q, N, V, C | | | | |
| 52 | F, I, S, N, Y, L, E, R, M, D, V, P, Q, T, W, A, G, C, | | | | |
| | K, H | | | | |
| 53 | K, D, E, S, R, I, G, H, W, T, A, Y, C, V, N, P, F, L, | | | X | |
| | M | | | | |
| 54 | R, P, S, A, K, T, Y, E, Q, V, G, H, N, L, D, M, C, I, | | | X | |
| | F | | | | |
| 55 | H, D, C, K, V, P, Q, N, W, L, G, T, R, I, Y, S, A, M, | | | | |
| | E, F | | | | |

TABLE 13W
H3_mb6
DERSSAKISVEFLLGLAKQFTDPRIREWLLKRAKRLAEEVGDDELKRLIEKVEEEL
(SEQ ID NO: 650)

| | | | | | |
|---|---|---|---|---|---|
| 1 | R, G, H, Q, P, I, A, V, W, E, F, M, Y, L, K, D, T, N, S | | X | | |
| 2 | R, M, N, T, P, A, Q, K, S, I, G, E, V, D, H, Y, L | | | | |
| 3 | T, N, P, R, H, A, F, M, Q, G, V, S, E, W, L, I, K, Y, D | | | | |
| 4 | H, E, P, A, N, G, R, I, L, M, S, D, F, Q, Y, V, K, W, T | | X | | |
| 5 | G, K, H, R, N, Q, P, S, M, T, D, E, Y, A | F | X | | |
| 6 | P, R, H, S, A, V, Q, G, K, E, L, Y, D, N | | | X | |
| 7 | T, Y, E, K, Q, N, V, R, W, S, M, L, F, G, D, I, A, H | | X | | |
| 8 | K, P, R, T, V, Q, H, A, L, G, N, S, M, D, I, Y | E | X | | |
| 9 | R, Q, M, A, K, S, P, Y, T, N, H, F | | X | | |
| 10 | I, V, T, C | | | X | |
| 11 | K, S, Q, H, R, A, T, E, M, G, D, N | | | | |
| 12 | F, W | | X | | |
| 13 | L, I | | X | | |
| 14 | L, V, I, M, C, A | | | | |
| 15 | K, R, N, H, I, Y, S, V, G, T, A, L, M, Q | | | | |
| 16 | L, M, K, I | | X | | |
| 17 | A, S, C, R, T, L, Y, H, I, M, V, N | | | X | |
| 18 | R, H, A, K, G, N, S, Q, T, Y | V, I | | | |
| 19 | R, N, S, Q, T, A | G, K | | | |
| 20 | F | | X | | X |
| 21 | K, R, N, G, Q, H, T, S, M, L, F, I, V, E, Y, A, D, W | | | | X |
| 22 | D | | | | X |
| 23 | K, A, L, I, M, T, F, R, P, N, S, V, H, D, E, Q, G, Y, C | | | | |
| 24 | N, H, L, A, V, I, R, T, D, Q, S, K, M, G, P, E | | X | | |
| 25 | S, N, T, I, D | | X | | |
| 26 | V, K, Q, I, R, C, T, E, S | | | | |
| 27 | T, A, V, R, L, M, S, I, E, H, K, Q, N, W, C, D, G | | | | |
| 28 | W | | X | | |
| 29 | L, I | | X | | |
| 30 | I, V, Y, L, C, F, T, M, H, A | | | | |
| 31 | R, V, A, K, T, H, I, Q, M, F, N, S, D, L | | | | |
| 32 | R | | X | | |
| 33 | A, S | | | X | |
| 34 | M, L, R, S, V, G, H, E, K, Q, T, I, C, W, A, F, N, Y, D | P | | | |
| 35 | K, S, N, A, L, R, G, I, H, D, T, V, Q, M | | | | |
| 36 | K, L, R, V, I, H, M, A, Q, C | | X | | |
| 37 | N, V, E, Q, S, A, T, G, I, C, Y, L, H, M | W | X | | |
| 38 | R, W, L, D, A, T, V, S, C, H, I, Y, G, E, M, F, K, N, Q | | | | |
| 39 | R, S, K, N, Q, T, G, M, I, V, L, E, Y, D, H, A, F, P | | | | |
| 40 | E, K, A, Y, R, D, V, C, I, W, P, S, Q, N, T, G, M, H, L, | | X | | |
| | F | | | | |
| 41 | N, A, R, S, T, K, E, H, G, P, I, V, M, Q, C, Y, F, W, L, | | | X | |
| | D | | | | |
| 42 | V, Y, E, D, T, S, K, Q, G, W, M, N, I, H, C, R, A, F, L | | X | X | |
| 43 | M, Y, R, I, Q, L, W, V, E, S, F, A, G, D, N, H, T, P, C, | | | | |
| | K | | | | |
| 44 | W, H, G, Y, D, M, R, K, V, E, F, T, C, S, Q, L, N, P, I, | | | | |
| | A | | | | |
| 45 | D, C, T, L, S, A, V, I, M, Y, Q | | X | | |
| 46 | Y, I, M, S, L, N, Q, R, C, E, V, K, T, H, G, W, P, F, A, | | | | |
| | D | | | | |
| 47 | N, H, M, D, A, W, K, L, G, C, R, Q, F, I, E, V, S, P, Y, | | | | |
| | T | | | | |
| 48 | R, K, V, Q, G, W, D, M, I, P, T, E, S, L, A, N, H, Y, F, | | | | |
| | C | | | | |
| 49 | I, V, A, C, Q, T, M, S, Y, H | | X | | |
| 50 | N, T, R, S, G, H, W, C, V, F, K, M, E, Y, L, I, A, D, Q, | | | | |
| | P | | | | |
| 51 | G, M, P, R, D, K, C, N, I, F, E, H, Q, V, S, T, A, L, Y | | | | |
| 52 | R, K, Y, F, C, Q, D, N, V, H, W, M, T, A, G, S, I, L | P, E | X | | |
| 53 | A, R, K, N, Y, S, V, H, E, G, D, C, W, T, Q, M, I, F | | | | |
| 54 | L, N, A, I, V, C, Q, R, H, S, F, T, G, W, E, M, D, K, P, | | | | |
| | Y | | | | |
| 55 | D, G, S, H, T, A, K, R, W, N, V, Q, Y, E, F, L, M, P, I | | | | |
| 56 | T, E, A, Q, I, M, L, R, V, P, K, C, H, Y, S, F, N, W, D, | | X | | |
| | G | | | | |

TABLE 13X
H3_mb7
TKERVEHLVKWLLERAKRMPSPISRKFLLGLAEQFARAGNDPELERLVEKVKREL
(SEQ ID NO: 651)

| | | | | | |
|---|---|---|---|---|---|
| 1 | K, A, R, S, Q, T, P, H, N, G, E | | X | | |
| 2 | K, R, G, S, H, Q, A, N, T | Y | | | |
| 3 | A, Q, P, H, S, G, K, T, N, D, E, R, Y, M | V | | | |
| 4 | R | | X | | |
| 5 | L,A, R, N, V, S, Q, I, G | K, C | X | | |
| 6 | F, W, N, V, A, Y, D, T, K, S, M, E, C, G, R, Q, I, H, L | | | | |
| 7 | K, M, R, I, V, Q, L, T, H, S, A, G, P, N, E | D, Y | X | | |
| 8 | M, L | | X | | |
| 9 | V | | | X | |
| 10 | F, G, M, V, Q, K, L, N, H, R, T, Y, C, I, W, A, S | D | | | |
| 11 | W | | X | | |
| 12 | L, C | | X | | |
| 13 | L, I, C, V | | | | |
| 14 | Q, M, G, D, E, L, A, S, T, H, K, W, F, R, C, Y, N | | | | |
| 15 | K, R | | X | | |
| 16 | A, S | C | | X | |
| 17 | R, K, V, S, Q, T, N, L, H,A, Y | C | | | |
| 18 | S, R, V, K, L, Q, H, M, T, A, G | I, D | | | |
| 19 | R, A, S, N, H, Y, M, G, F, Q, T, K | | X | | X |
| 20 | Y, R, A, W, K, T, G, H, N, P, Q, V, S, I, M | E | | | X |
| 21 | T, K, R, H, A, N, S, L, F, Q, V, Y | | X | | X |
| 22 | D, V, Q, M, H, R, L, I, T, N, E, K, P, F, A, W, S, Y, G | | X | | |
| 23 | M, L, I | | X | | |
| 24 | S | | X | | |
| 25 | R, K, Q | | | | |
| 26 | I, S, G, N, R, K, T, E, Q, A, D, H, M, V | | | | |
| 27 | F | W | X | | |
| 28 | Q, L | N | X | | |
| 29 | L, I, M, F | | | | |
| 30 | G | | | | |
| 31 | L | | X | | |
| 32 | A | | | X | |
| 33 | E, S, T, A | Q | | | |
| 34 | N, S, T, Q, G | R | X | | |
| 35 | Y, F | | X | | |
| 36 | A | S | | X | |
| 37 | H, N, R, T, L, S, K | M | | | |
| 38 | K, R, N, Q, S, A, G, D | | X | | |
| 39 | S, G, A, N, R, C, Q, I | | | X | X |
| 40 | S, Q, M, R, N, H, G, A, T, L, D, K, P, V, E | | | X | |
| 41 | H, R, L, M, Y, D, A, Q, F, N, S, T, K, V, C, I | | | X | |
| 42 | W, K, A, P, E, M, T, I, N, R, G, Q, H, L, F, Y, V, S, | | | | |
| | D, C | | | | |
| 43 | K, Q, D, A, I, N, S, T, E, Y, P, V, W, C, F, L, M, R, | | | | |
| | G, H | | | | |
| 44 | L, M | | X | | |
| 45 | M, C, Q, N, S, L, Y, I, H, E, V, G, F, W, R, T, A, K, | | | | |
| | D, P | | | | |
| 46 | S, Y, K, F, R, L, V, Q, H, A, C, M, E, D, N, I, T, W, | | | | |
| | G | | | | |
| 47 | I, L, W, M, T, Q, E, F, Y, V | R, D, A, C | | | |
| 48 | V | I | X | | |
| 49 | D, W, A, T, E, M, L, R, Q, S, N, H, I | V, G | | | |
| 50 | M, I, N, K, H, T, R, G, A, L, D, Q, S, V, Y, C, F, E | | | | |
| 51 | S, W, T, V, N, Y, L, C, H, F, G, Q, M, A, I, E, R | | X | | |
| 52 | Q, A, K, S, T, D, N, G, R, M, E | H, V | | | |
| 53 | Y, G, S, R, Q, E, F, L, K, C, T, V, W, A, I, N, M, H | D | | | |
| 54 | R, Q, T, L, G, K, N, E, H, S, M, D, I, V, Y | F | | | |
| 55 | L, M, I, H, V | F, C | X | | |

TABLE 13Y
H3_mb8
DQAKRMVEWLLKKAREALKLGNEISVRFLLGLAKQFAHANNDEEAERLVREFEKEL
(SEQ ID NO: 652)

| | | | | | |
|---|---|---|---|---|---|
| 1 | T, N, G, S, K, Q, H, R, D | F, I | | | |
| 2 | A, T, N, K, S, Q | E, V | X | | |
| 3 | L, A, G | Y, S, P, R | | X | |
| 4 | L, R, Y, K, Q, N, I, M, F | V, E | | | |
| 5 | P, A, Q, K, R, T | V, E, L, H, W, G | | | |
| 6 | M | W, V, P, T, C, R, Y, S, G | X | | |
| 7 | V | M, L, C, W, A, P, T, I | | X | |
| 8 | I, V, E, R, K, Y, Q | W, P, N, G, M, L, C, H, A | | | |
| 9 | W | P, I, F, G, H, Q | X | | |
| 10 | L | A, C | X | | |
| 11 | L | F, A, S, P | | | |
| 12 | P, K, R | I, S | | | |
| 13 | K, R | Y, L, C, W, V, G, A | X | | |
| 14 | A | E, L, T, D, M, Y | | X | |
| 15 | V, R, H | L, P, A, S, T, C, G, N | | | |
| 16 | K, T, R, W, Q, I, V, H, Y, A, N, | | | | |
| | L, F, P, S, G, M, D, C, E | | | | |
| 17 | S, N, G, A, E | L, Q, I, T, C, W | | X | |
| 18 | K, V, T, A, R, L, Y, I, H, D, S, | E, C, P | | | |
| | M, F, N, Q, W | | | | |
| 19 | K | R, M, C, I, L, A, G, T | | | |
| 20 | R, K, H, L | G, E, I, F, W | | | X |
| 21 | R, K, G, H, N | F, D, W, C, V, Q | | | X |
| 22 | R, H, K, N, P | S, M, C, A, Y, L | X | | X |
| 23 | Q, T, M, A, W, K, R, H, S, V, I, | P, N | X | | |
| | E, G, Y, F, C | | | | |
| 24 | M, L, I | F, Y, S, T, P, K | X | | |
| 25 | S | L, Q, R, V, E, H, K | X | | |
| 26 | L, I, W, V | P, D, Y, S | | | |
| 27 | Q, D, N, R, H, S, T, E, M, V, K, | Y, P, F | X | | |
| | G | | | | |
| 28 | F | G, E, I, P, M, D, H | X | | |
| 29 | L | A, S, M, W, E, H, T, F, D | X | | |
| 30 | Y, H, F, L, W | Q, A, N | | | |
| 31 | G | T, Y, H, R, L, K | | | |
| 32 | N, L, T | S, P, C, R | X | | |
| 33 | A | Q, T, Y, M, E, H | | X | |
| 34 | Q, N, K | H, I, C, T, Y, M, S, R, P | | | |
| 35 | N, R, G, Q | K, S, Y, P, L, C, H, V, W, | X | | |
| | | I | | | |
| 36 | F | A, D, Y, V, W | X | | |
| 37 | A | S, W, M, D, P, R | | X | |
| 38 | F, Y, G, S, H, W, A, M, C, T, P | Q, L, I | | | |
| 39 | R, K, A, N | H, D, V, C, T | X | | |
| 40 | S, A, G, R, K, N, T | I, D | | | X |
| 41 | H, K, R, N, M, G | P, Y, I, F, Q, S, V | | | X |
| 42 | T, G, N, Q, D, I, R, L, E, H | C, F, V | | X | X |
| 43 | G, R, P, H, K, I, E, S, M, L, F, | N, Y, D, W | | | |
| | V, Q, A | | | | |
| 44 | Y, S, H, E, T, W, D, L, C, Q, R, | A, I, F, V, M, G | | | |
| | K | | | | |
| 45 | A | T, Y, V, Q, I, H, N, P, S | X | | |
| 46 | I, K, R, M, V, Q, T, S, E, N, G, | A, Y | | | |
| | D, P, C | | | | |
| 47 | R, A, H | T, Y, C, M, K, L, F | | | |
| 48 | M, W, L, Q, H, D, A, E, N, G | S, F, T, C, I | X | | |
| 49 | V | D, T, A, R | X | | |
| 50 | S, R, V, A, L | K, P, C, E, T | | | |
| 51 | I, E, L, D, N, G, V, T, H, Q | A, M, K, Y | | | |
| 52 | F | T, K, P, L | X | | |
| 53 | E | K, Q, A, C, F | | | |
| 54 | G, H, W, F, K, V, T, I, L, Q, Y, | A, E, N, D, M | | | |
| | R, S, C | | | | |
| 55 | P, V, E, M, R, L, Y, C, T, D, G, | W | | | |
| | N, A, I, H, K, Q, S, F | | | | |
| 56 | K, A, M, R, G, T, Q, S, Y, L, C, | | X | | |
| | W, I, P, N, H, E, D, F | | | | |

TABLE 13Z
H3_mb9
DLREKLKSMVKDLLRKAQESQDPYYAHQAEILIETIRKLAKDPDVQRLAQEALESLRKYL
(SEQ ID NO: 653)

| | | | | | |
|---|---|---|---|---|---|
| 1 | D, N | S, P, G | | | |
| 2 | L, I, M | P, F, V | X | | |
| 3 | K, R | | | | |
| 4 | E, G, Q | S, A, D, L, F, K, T, M, Y, V, W, | | | |
| | | H, N, I | | | |
| 5 | N, R, S | K, E, D, A, G | | | |
| 6 | I, L | | | | |
| 7 | K | M, S | | | |
| 8 | Q, N, F, T, S, K, R, L, W, | G, E, C, I, V | | | |
| | D, H, M, Y, A | | | | |
| 9 | R, T, H, K, V, S, I, A, N, | M, L, Y, F, D, W | X | | |
| | Q | | | | |
| 10 | I, V | F, M, L | | X | |
| 11 | R, K | A, L, S, M, T, Q, C, N, V, I, G, W, H | | | |
| 12 | M, L, T, K, H, F, Q, E, R, | S, D, A, G, W | | | |
| | I, V, N, Y, C | | | | |
| 13 | L | I, M, V | X | | |
| 14 | W, A, Y, H, F | L, T, S, V, Q, M, R, C | | | |
| 15 | R, K, Q, F, H, L, Y, W, M, | N, V, A, G, I, C, E, D | | | |
| | T, S | | | | |
| 16 | K, E | R, Q, M | | | |
| 17 | A | G, V, S, F | | X | |
| 18 | M, I, L, V, F, Y, K, Q | W, H, T, C, R, E, N, S, G | | | |
| 19 | E, A, M, L, Q, D, N, K | R, S, H, I, V, T, G, Y, F | | | |
| 20 | K, R, S | A, N, M, V, Q, G, H | | X | X |
| 21 | N, G, Q, K, H | D, R, E, A, S, T, M, P, Y, L, V, C | | | X |
| 22 | N, S, D | K, Q, T, R, E, A, H, M | | | X |
| 23 | P, K, V | R, A, I, H, T, S, Q, Y, E, M, C, F, | | | |
| | | W, G, L | | | |
| 24 | N, K, G, R, H, A, S, D, Q, | F, C | X | | |
| | E, L, M, V, T, P, Y, I | | | | |
| 25 | L, I, Y | F, M, K, V, W, A | X | | |
| 26 | M, C, I, V | A, Q, G, R, S, K, T | | | |
| 27 | R, K, G, A, P, H | M, S, Q, T, N, C, E, D | | | |
| 28 | Q | | X | | |
| 29 | C, V, T, I, A | Y, S, H, F | | X | |
| 30 | M, G, Y, A, S, C, R, E, K, | T, Q, V, H, W | | | |
| | I, F | | | | |
| 31 | L, I | | X | | |
| 32 | L, F | | X | | |
| 33 | I | | | X | |
| 34 | N, M, R, K, A, E, Q, D, G, | T, H, F, L, I, C, V, Y | | | |
| | S | | | | |
| 35 | L, K | T, V, M, I, G | X | | |
| 36 | I | V | X | | |
| 37 | K, R, A | Q, H, Y, M, G, C, W, S, F, N, L | | | |
| 38 | K | R | X | | |
| 39 | F, L | W, H | X | | |
| 40 | V, A | C, M, I | | X | X |
| 41 | I, M, A, V, S, L, P, N, G, | K, R, C | X | | X |
| | D, E, Q, H, T, F, W, Y | | | X | |
| 42 | D | A | | | X |
| 43 | P, K | R, T, S, H, V, A, Q, I, C, N, E, G, | | | |
| | | L, Y | | | |
| 44 | G, S, E, Q | D, A, T, H, I, M, N | | | |
| 45 | I, V | L | | | |
| 46 | V, T, M, I | E, Q, S, A, R, N | | | |
| 47 | R, K, Q, A, S | N, M, L, T, H, I, F, V, Y, C, E, G, | | | |
| | | D | | | |
| 48 | C, V, T, A, I, E, H | Q, L, Y, S, F, M, K, D, N | | | |
| 49 | C, A | T | | X | |
| 50 | T, N, S, G, A, E, Q, C | K, D, V, H, L, I, R, M, F, Y, W | | | |
| 51 | S, C, E, A, Q, N, D, Y, F, | R, V, L, I | | | |
| | W, H, G, T, K, M | | | | |
| 52 | A | S | | X | |
| 53 | I, L | V, E | | | |
| 54 | V, T, N, A, R, S, E, D, W, | G | | | |
| | L, Y, F, M, Q, K, C, I, H | | | | |
| 55 | W, Q, T, S, K, H | A, E, I, Y, D, V, R, N, G, M, F, C, | | | |
| | | L | | | |
| 56 | L, I | | | X | |
| 57 | R, K, A, Q | H, G, S, T, N, P | | | |
| 58 | N, V, A, S, G, I, K, T, C, | | | | |
| | H, L, F, Q, M, R, D, E, W, | | | | |
| | Y, P | | | | |
| 59 | W, M, F, Q, T, S, D, I, L, | N, G, Y, K, E, A, P, R, C | | | |
| | V, H | | | | |
| 60 | Y, F, T, W, H, P, I, R | L, Q, V, A, M, S, N, K, D, C, E, G | | | |

TABLE 13A A
H3_mb1
DDIQKEAKKVIEQLQRIAKTFPDNMNVRYLVMLAERFAHAAQRMNDEEALKLAKRLLEKAKKAG
(SEQ ID NO: 654)

| | | | | | |
|---|---|---|---|---|---|
| 1 | P, S, M, I, V, A, K, H, N, D, | | | | |
| | Y, R, W, F, L, G, E, T, Q, C | | | | |
| 2 | S, I, N, W, L, Y, D, A, G, V, | C | | | |
| | H, F, T, P, K, R, E, M, Q | | | | |
| 3 | I, V, M, L, T, H, F | N, P, K, Q, R, A, C, Y | | | |
| 4 | H, Q, D, T, F, M, A, W, Y, N, | I, C | | | |
| | E, K, S, L, V, R, P, G | | | | |
| 5 | W, Y, I, E, D, G, K, Q, T, R, | | | | |
| | M, N, V, L, S, P, A, F, H | | | | |
| 6 | R, K, G, S, N, A, E, Q, D, P | H, M, T, C, V, L | | | |
| 7 | C, V, T, A, S, I, G | Y, Q | | X | |
| 8 | V, A, I, F, N, L, D, K, G, E, | W | | | |
| | H, S, Q, Y, R, M, T, P, C | | | | |
| 9 | H, R, K, Y, L, F, V, A, S, I, | W, G, C | | | |
| | N, M, Q, T, E, D | | | | |
| 10 | V, T, I, L, C | A, M | | X | |
| 11 | M, T, E, L, G, H, V, I, Q, S, | R | | | |
| | C, F, Y, D, N, K, W, A | | | | |
| 12 | G, R, W, M, N, Q, K, L, Y, C, | | | | |
| | T, D, E, F, S, V, I, A, H | | | | |
| 13 | R, A, L, N, Q, E, K, D, T, Y, | W, G, F | | | |
| | H, C, V, M, S, I | | | | |
| 14 | L, M | C, I | | X | |
| 15 | R, H, W, Q, M, Y, D, A, T, K, | C, I | | | |
| | E, S, G, N, L, V, F | | | | |
| 16 | F, R, I, G, S, H, W, A, D, M, | C, E | | | |
| | V, K, T, Y, Q, L, N | | | | |
| 17 | L, C, T, M | A, I, V, Q, Y, F, W | | X | |
| 18 | F, M, Y, D, N, H, L, I, Q, A | S, W, V, G, T, C, R, E, K, P | | | |
| 19 | R, K, L, D, T, W, H, G, Y, A, | I, N, P | | | |
| | V, F, S, E, C, M, Q | | | | |
| 20 | R, M, L, Y, F, K, W, H, T, Q, | | | | |
| | I, G, N, A, D, C, V, S, E | | | | |
| 21 | H, F, Y, W, Q, C, N, A, L | V, E, R | | X | X |
| 22 | W, G, P, A, K | Y, T, S, H, M, F, N, D, V, R, | | | X |
| | | I, L, Q, E, C | | | |
| 23 | F, K, R, L, T, A, H, Q, Y, S, | E, W, C | X | | X |
| | I, G, V, N, D, M | | | | |
| 24 | N, D | E | | | X |
| 25 | W, M | | X | | |
| 26 | P, E | N, V, T, A, S | X | | |
| 27 | V, K | | | X | |
| 28 | Y, F, I, V | H, K, W, Q, T, M, R, L, C | X | | |
| 29 | L | Y, P | X | | |
| 30 | R, I | Y, L, V, W, M, T | X | | |
| 31 | G, A, Q, S | T, V, Y, W, E, C, I, M | | X | |
| 32 | R, L, I, Q, A, K, V, N, S, G, | T, D, M, H | | | |
| | P, E | | | | |
| 33 | L | | X | | |
| 34 | A, G | | | X | |
| 35 | I, V, E | H, F, Q, L, Y, M, C | | | |
| 36 | R, K | | X | | |
| 37 | F | | X | | |
| 38 | V | C, A, I, T, G | | X | |
| 39 | E, D, Q, A, N, G, H, V, K | M, S, L, T, F, W, I, R, Y, C | | | |
| 40 | Y, H, W, F | R, Q, A, V, N, T, L, S | X | | |
| 41 | A, S, G | | | X | |
| 42 | C, I, Q, V, M, A, T, E, D, S | G, H, L, K, N, R, W, F | | | |
| 43 | S, K, R, Q, N, E, T, G, A | D, H, V, M, I | | | |
| 44 | R, K, T | N, S, G, M, A, Q, H, P, L, V | X | | |
| 45 | L, N, D, V, T | G, K, Q, P, E, S, A, R, M, Y, C, | | | X |
| | | H, W, F, I | | | |
| 46 | N, H, S, G, T, Q, K | L, M, D, A, E, R, V, C, I | | | X |
| 47 | A, R, S, K, W, D, P, Q, T, F, | I | | | |
| | H, E, Y, G, M, V, L, N, C | | | | |
| 48 | L, V, I, T, M | Q,E,N | X | | |
| 49 | A | P | X | | |
| 50 | I, L, V, P | M | | | |
| 51 | M, R, G, Y, S, H, L, F, N, V, | E, A | | | |
| | K, T, C, I, Q | | | | |
| 52 | I,V | L | X | | |
| 53 | A, G, S, C | T | | X | |
| 54 | G, V, K, Y, W, H, R, F, A, N, | S, M, C, I, L, T, D | | | |
| | Q, E | | | | |
| 55 | V, K, L, I, N | T, R, Y, M, H, S | X | | |
| 56 | L | | X | | |
| 57 | R, Y, L, A, F, Q, G | W, V, M, C, K, E, I, T, S | | | |
| 58 | Y, F, W | H, G, M, D, E, V, Q, T, L, A, S, | | | |
| | | I, N, R, K, C | | | |
| 59 | F, M | K, Y, N, W, S | X | | |
| 60 | A, S, V | C,T, G | | X | |
| 61 | M, L, C, A, K, E, Q, I, S, G, | F, R | | | |
| | T, N, Y, H, V, W | | | | |
| 62 | K, R, T, A | D, N, V, S, F, Y, Q, H, M | | | |
| 63 | W, Y, F | H, A, N, S, Q | | X | |
| 64 | A, G | S,T | | | |

TABLE 13BB
IGF1R_mb1
STRNAEFIMLLLELCVKSKNDPQVQEYVKKVKKQVERLVGNGDEKKAEEVARKALEYCADG
SEQ ID NO: 713

| | | | | | |
|---|---|---|---|---|---|
| 1 | T, D, M, G, K, A, V, I, F, N, Q, R, | | | | |
| | Y, S, P, H, L, E | | | | |
| 2 | R, N, Q, A, F, H, P, G, S, D, T, W, | | | | |
| | M, E, Y, I, V, K, L | | | | |
| 3 | Q, S, P, A, M, V, K, Y, D, T, G, E, | | X | | |
| | R, N, I, H, L, F | | | | |
| 4 | H, D, S, N, E, Q, T, G | | X | | |
| 5 | A, S, W, G, T, I, P, L, V, C, Y, F | | X | | |
| 6 | D, H, Q, E, R, G, F, N, Y, P, M, K, | | X | | |
| | S, W, I, C, T, V, L | | | | |
| 7 | F | | X | | |
| 8 | Y, F, M, L, I, H, W, V, T, N | | X | | |
| 9 | M, C, L, F, V, W, T, Y, I | | | X | |
| 10 | G, A, K, R, L, T, M, Q, E, S, C, V, F | | X | | |
| 11 | M, V, L, I | | X | | |
| 12 | L, V, F, M, I, T, S, A | | | X | |
| 13 | Q, E, D, H, V, M, S, I, T, N | | | | |
| 14 | V, L, I, T | | X | | |
| 15 | C, A, I, V, L | | X | | |
| 16 | V, C, I, M, L, A, F, S, T, G, W | | | X | |
| 17 | R, Q, S, D, K, G, E, T, N, V, M, | | | | |
| | A, H, P | | | | |
| 18 | G, Q, P, D, T, H, S, N, R, E, K | | X | | |
| 19 | N, S, T, G, E, K, H, P, D, Q, C, V, | | X | | X |
| | A, Y, I, F | | | | |
| 20 | W, F, V, I, R, P, S, D, E, Q, K, L, | | | | X |
| | H, T, N, Y, G, A | | | | |
| 21 | F, K, H, E, Y, T, A, N, R, | P, W, L | | | X |
| | I, V, G, S, D | | | | |
| 22 | S, L, Q, M, G, A, V, I, N, F, T, K, | | | | |
| | E, H, R, D, Y, P, C, W | | | | |
| 23 | I, R, Y, F, E, K, A, L, N, D, Q, W, | | | | |
| | G, S, T, V, M, P, H, C | | | | |
| 24 | K, F, T, S, R, Y, A, V, Q, | I | | X | |
| | W, G, E, M, D, P, L, H | | | | |
| 25 | P, H, W, Y, A, M, R, L, G, S, D, V, | | | | |
| | N, K, Q, I, E, T, F | | | | |
| 26 | T, S, K, V, N, A, Q, R, M, D, G, P, | | | | |
| | E, H, W, Y, L, I, F | | | | |
| 27 | K, P, Q, R, H, N, E, S, T, G, M, Y | | | | |
| 28 | Y, M, I, F, T, Q, N, P, L, V, W, H, | | | X | |
| | G, A | | | | |
| 29 | W, G, M, N, H, Y, S, D, Q, L, T, K, | | | | |
| | R, F, E, I, A, V, P | | | | |
| 30 | Y, D, Q, M, R, T, E, S, K, N, V, P, | | | | |
| | A, G, F | | | | |
| 31 | N, I, G, A, M, Y, K, T, L, | Q, V, R, C, F, W | | X | |
| | D, P, E, H, S | | | | |
| 32 | R, P, D, K, S, Q, G, E, H, N, A, | | | | |
| | T, V | | | | |
| 33 | F, T, V, Q, S, G, Y, D, W, N, A, L, | | | | |
| | K, R, M | | | | |
| 34 | N, E, H, Q, V, D, C, G, M, R, L, K, | | | | |
| | S, A, I, Y, F, W, T, P | | | | |
| 35 | T, V, I, C, A, S, M | | | X | |
| 36 | K, D, N, L, H, T, I, R, S, A, V, Q, | | | | |
| | P, E, F, Y, W, M | | | | |
| 37 | L, T, H, I, A, V, M, G, P, F, K, E, | | | | |
| | S, N, Q, C, Y, R, D, W | | | | |
| 38 | N, C, F, E, M, D, R, S, Q, K, T, H, | | | X | |
| | L, W, Y, G, P, V, A, I | | | | |
| 39 | I, H, V, C, T, R, E, S, A, | L | | | |
| | N | | | | |
| 40 | V, Y, C, Q, I, R, G, H, L, N, M, K, | | | | |
| | S, A, D, F, E, T | | | | |
| 41 | Y, W, M, H, V, K, A, E, D, T, R, L, | | | | |
| | N, S, F, C, G, Q | | | | |
| 42 | E, A, Q, D, R, Y, G, S, N, K, T, C, | | | | X |
| | M, H | | | | |
| 43 | G, Q, W, N, R, Y, H, L, D, K, M, C, | | | | |
| | S, E, A, T, F, V | | | | |
| 44 | W, N, G, Y, A, I, E, P, M, S, T, H, | | | | |
| | Q, K, F, D, V, C, L, R | | | | |
| 45 | L, I, G, S, A, H, F, D, Y, P, T, R, | | | | |
| | V, M, E, K, Q, N, W, C | | | | |
| 46 | Q, T, I, H, F, W, P, E, R, | A, K, S, G, D | | | |
| | Y, M, N, V | | | | |
| 47 | G, A, S | | | X | |
| 48 | D, E, N | | | | |
| 49 | L, A, V, Q, R, T, D, S, I, N, E, K, | | | | |
| | G, F, H, M, P, Y | | | | |
| 50 | I, M, T, R, H, Q, A, W, S, V, K, L, | | | | |
| | C, F, Y, E | | | | |
| 51 | S, A, G | | | X | |
| 52 | N, Q, S, Y, A, L, D, R, F, H, I, T, | | X | | |
| | G, E, K, M, V | | | | |
| 53 | G, E, F, M, D, T, R, Q, H, N, K, S, | | | | |
| | Y, V, A, I, L, W, P | | | | |
| 54 | G, V, M, I, A, T, L, C, S, N, W | | | X | |
| 55 | M, L, V | | X | | |
| 56 | T, D, Q, N, E | | X | | |
| 57 | V, S, L, G, T, N, E, K, M, | C | | | |
| | F, I, A, W, R, H, Y, Q | | | | |
| 58 | C, A, V, T | | | X | |
| 59 | D, S, P, A, C | | X | | |
| 60 | E, L, P, G, D, S, N, A, V, T, R, Q, | | X | | |
| | H, I, M, K | | | | |
| 61 | D, L, E, H, M, C, Y, S, G, A, N, K, | | | X | |
| | T, I, V, F, Q, R, P, W | | | | |

TABLE 13CC
IL7Ra_mb1
HEVQELARKLWHATEKAEKRNDEKAVKLLEDASVLLVNAWLSNDEDLKKKANKYAKTVIKQAES
(SEQ ID NO: 759)

| | | | | | |
|---|---|---|---|---|---|
| 1 | E | Y, H, W, L, M, Q, S, R | | | |
| 2 | A | E, R, L, D, V, I | | | |
| 3 | M, A | V, F, I | X | | |
| 4 | Q | | X | | |
| 5 | E | | | | |
| 6 | L, M, I | | | X | |
| 7 | A | | X | | |
| 8 | R, E | | X | | |
| 9 | R, K, Q, L, I, A | | | | |
| 10 | L, I, M, V | | | X | |
| 11 | H, W | | X | | |
| 12 | H, N, K, Q, R | | X | | |
| 13 | A, M, V, H, Q, I, L, S, R | | | X | |
| 14 | T, R, S, H, M, L | | | | |
| 15 | R | E, H, V, K | X | | |
| 16 | A | N, K, L, T, I, E | | | |
| 17 | A, M | | | X | |
| 18 | E | | | | |
| 19 | K | | | | |
| 20 | M, E, D, R, K, A | N | | | X |
| 21 | N | | | | X |
| 22 | D, N, L, E, M, K | | | | X |
| 23 | E | | | | |
| 24 | K | | | | |
| 25 | M, A, N, L | I, R, V | | | |
| 26 | V, K, I, A, F, M, R | | | | |
| 27 | K | | | | |
| 28 | I, L, K, M, A, R, H | | | | |
| 29 | L, I, M | | | X | |
| 30 | E, N, T, V, Q | | X | | |
| 31 | D, E, S, N | | X | | |
| 32 | A, S, V | | | X | |
| 33 | T, Y, I, N | S, A, K, L | X | | |
| 34 | V | | X | | |
| 35 | E, L, M, I, H, A, R | | | | |
| 36 | L | | X | | |
| 37 | V | | X | | |
| 38 | Y, E, H, T | N, V | X | | |
| 39 | A, S, T | | | X | |
| 40 | W, Y, H | | X | | |
| 41 | L, A, I, M | | X | | |
| 42 | S, T | | | | X |
| 43 | N | | | | X |
| 44 | D, E, N, I, K | | | | X |
| 45 | E | | | | |
| 46 | D | | | | |
| 47 | M, L, Q, I, A, E, K | | | | |
| 48 | M, L, E | K | | | |
| 49 | K | | | | |
| 50 | K | | | | |
| 51 | A, S, V, I | | | X | |
| 52 | N | | | | |
| 53 | K | | | | |
| 54 | V, Y, H, F, M, E, K | | | | |
| 55 | A, V | | | X | |
| 56 | K | | | | |
| 57 | T | | | | |
| 58 | V, M, R, L, A, I, Q | | | X | |
| 59 | L, M | I, W, F, Y | | | |
| 60 | K | | | | |
| 61 | L, Q, I, M, R, F, E | | | | |
| 62 | T, I, A, S, Q, V, L | | | X | |
| 63 | E | | | | |
| 64 | S | | | | |

TABLE 13DD
IL7Ra_mb2
SVIEKLRKLEKQARKQGDEVLVMLARMVLEYLEKGWVSEEDADESADRIEEVLKK Optimized
SEQ ID NO: 760

| | | | | | |
|---|---|---|---|---|---|
| 1 | D, E, Y, F, I, H, S, V, Q, | P | | | |
| | G, M, A, L, T, C, K, N, | | | | |
| | R, W | | | | |
| 2 | A, T, L, V, I, S, G, P, F, | M | | X | |
| | D | | | | |
| 3 | I, V, Y, L, W, M, F, E, A | D, N, K, R, C, Q, S, T, H, G | | | |
| 4 | D, E, A, Q, Y, I | N, M, R, S, W, L, T, K, G, H, F, | | | |
| | | V, C | | | |
| 5 | H, K, R, N, T, C, E | | | | |
| 6 | L, V, M | I, C | | X | |
| 7 | E, Q, L, M, I, R, W, V | D, T, G, C, K, H, A, Y, N, F, S | | | |
| 8 | Q, A, M, E, D, L, N, W, I, | V, G, K, S, H, F | | | |
| | C,T, R, Y | | | | |
| 9 | I, M, V, T, L | A | | X | |
| 10 | L | V, Q, E, I, Y, C, A, M, R, F, W, | | | |
| | | K, G, H | | | |
| 11 | E, M, Q, A, Y, W, L, I, R, | G, T, H, S, D, N, V, F, C | | | |
| | K | | | | |
| 12 | M, A, W, D, H, N, F, T, R, Y, K, E, | | | | |
| | I, L, V, Q, S, C | | | | |
| 13 | A | | | X | |
| 14 | L, I, M, A, E | Q, C, Y, H, F, V, R, T, S, K, W, | | | |
| | | N, D, G | | | |
| 15 | L, E, W, C, F, M, H, K, T, | I, R, Y, G, A, D | | | |
| | N, S, V, Q | | | | |
| 16 | Q, M, N, A, K, H, F, V, Y, | W, T | | | |
| | I, E, C, L, S, R | | | | |
| 17 | K, G, N, H, R, Q, S, A, C, | | | | X |
| | D, T, V | | | | |
| 18 | D | | X | | |
| 19 | K, M, T, Q, G, Y, S, L, E, F, D, I, | | X | | |
| | P, V, R, A, H, C, N, W | | | | |
| 20 | V | I, L, T, M | X | | |
| 21 | L, M, C | G, A, S, Y | | X | |
| 22 | L, S, Q, V, Y, I, W, F, T, E, M, | | | | |
| | C, A, G, R, N, D, P | | | | |
| 23 | F, M | W, I, L, Y, T, R, V, A, | X | | |
| | | H, S, E, N, Q, D, C | | | |
| 24 | L, I, M, W | | X | | |
| 25 | S, A, C, I, V, G, P, E | T, M, L | | X | |
| 26 | E, C, N, Q, M, V, R, H, K, | A, Y, F, D, W | | | |
| | S, G, I, T, L | | | | |
| 27 | M | Y, C, S, I, R, H, K, N, | X | | |
| | | E, W, T, A, L, G, Q, | | | |
| | | V, D | | | |
| 28 | I, V, L, T, D, G | | X | | |
| 29 | M, W, F, I, L, Y, A, V, P | R, G | | | |
| 30 | W, C, Y, F | M, D, H, T, E, S, K, A, N, I, | | | |
| | | V, R, L, Q, G | | | |
| 31 | Y, F | M, A, L, C, S, G, H | X | | |
| 32 | M, F, L, Y, I, V, H, G, P, R | | | X | |
| 33 | E, S, D, Q, R, N, A, T | K, C, G | | | |
| 34 | M, L, H, T, D, E, S, K, I, A, G, Q, | | | | |
| | F, W, N, R, V, C, Y | | | | |
| 35 | N, G, H, D, K, E, S, A, R, C, V, I, W | | | | X |
| 36 | W | V, M, Y, E, L, Q, T, D, | X | | X |
| | | F, I, A, H, N, S | | | |
| 37 | C | V, I | X | | X |
| 38 | S, T, N | D | | | X |
| 39 | D, F, W, C, S, E, T, Y, N, | V, I, P, K, M, Q, H, G, R | | | |
| | A, L | | | | |
| 40 | A, T, S, L, D, Q, E, V, M, | Y | | | |
| | I, C, N, K, H, R, F, G, | | | | |
| | W | | | | |
| 41 | D, E | V | X | | |
| 42 | A | | X | | |
| 43 | W, C, F, T, D, S, N, A, V, G, Y, E, | | | | |
| | R, Q, K, L, I, M, H, P | | | | |
| 44 | S, D, E, Y, Q, A, H, L, W, | I | X | | |
| | M, N, C, R, K, V, G | | | | |
| 45 | A, C | S, T, V, I, F | X | | |
| 46 | A, M, V, C, I, L | S | | X | |
| 47 | R, A, D, M, E, S, I, T, H, | W | | | |
| | C, K, V, G, Q, N, L, F, | | | | |
| | Y | | | | |
| 48 | R | | X | | |
| 49 | L, I | | X | | |
| 50 | N, V, W, F, A, L, C, E, Y, | H | | | |
| | T, M, I, S, D, Q, G, R, | | | | |
| | K | | | | |
| 51 | D, T, I, K, W, N, E, F, V, H, L, Q, | | | | |
| | S, Y, R, A, C, M, G | | | | |
| 52 | V, I, A, C, M, L | T | X | | |
| 53 | V, L, I, M, F, H, P | | | | |
| 54 | T, W, H, I, R, F, Q, C, D, K, G, E, | | | | |
| | N, Y, M, L, S, V, A, P | | | | |
| 55 | D, Y, W, K, S, R, N, L, V, T, Q, M, | | | | |
| | H, F, A, G, P, I, E, C | | | | |

TABLE 13EE
IL7Ra_mb3
DEVHKLAEKAARLALKKGDWDAHAKVVNVFLALKHGIISKEQAKKILKKIIEEILS
(SEQ ID NO: 762)

| | | | | | |
|---|---|---|---|---|---|
| 1 | A, K, D, T, S, I | | | | |
| 2 | E | | | | |
| 3 | M | A, F, L, V | | | |
| 4 | D, V, R | N, H | X | | |
| 5 | K | | | | |
| 6 | M, H, I, L, E, W, F | | | X | |
| 7 | S, A, E | | X | | |
| 8 | V, E, T | | X | | |
| 9 | K | | | | |
| 10 | V, I, A | | | X | |
| 11 | A | | X | | |
| 12 | V, R, K, H, S | | X | | |
| 13 | M, Y, H, F, L, N, I | | | | |
| 14 | V, A | | | X | |
| 15 | I, V | A, L | X | | |
| 16 | K | | | | |
| 17 | M, T, N, R, K, V, Q, E | | | | |
| 18 | E, D | Q, N, G | | | X |
| 19 | N, K, I, S, D, A | | | | X |
| 20 | I, L, R, K | W | X | | |
| 21 | H | E, D | X | | |
| 22 | K, M | L, Q, S, A | | X | |
| 23 | H | | X | | |
| 24 | V | A | X | | |
| 25 | T, N, R | K | | | |
| 26 | I, V | | X | | |
| 27 | V | | X | | |
| 28 | K, R | N | X | | |
| 29 | K, R | L,V | | X | |
| 30 | W, Y, H | F | X | | |
| 31 | L | | X | | |
| 32 | R | M, H, I, A | X | | |
| 33 | N, V, M, F | Y, L | | X | |
| 34 | R, Q | M, E, K | | | |
| 35 | A | H | X | | X |
| 36 | G | | | | X |
| 37 | D, E, F, K, Q, R, T | I | X | | X |
| 38 | R, K, L | M, I | | | X |
| 39 | S | | | | X |
| 40 | K | | | | |
| 41 | E | | | | |
| 42 | K | E, A, Q | | | |
| 43 | F | V, M, I, L, Y, A | | | |
| 44 | K | | | | |
| 45 | K | | | | |
| 46 | K, E, R | I | | | |
| 47 | F, I, H, Q, L, M | | | X | |
| 48 | K | | | | |
| 49 | K | | | | |
| 50 | Q | F, M, I | | X | |
| 51 | M, E, V | I | | | |
| 52 | E | | | | |
| 53 | H, A, N, T | L, I, E | | | |
| 54 | M, V, I, D, Q, L | | | X | |
| 55 | L | | | | |
| 56 | S | | | | |

TABLE 13FF
IL7Ra_mb4
DDTKLARRKVKLALTIVKNASSKEEADRALHIAEIVADEVNEPTLQEQVTRTKKWVEKYFS
(SEQ ID NO: 763)

| | | | | | |
|---|---|---|---|---|---|
| 1 | E, D, H, V, C, S, G, I, A, | Q, T, Y, M, P, F, W | | | |
| | N, R, K, L | | | | |
| 2 | D, C, N, T | E, G, A, S | X | | |
| 3 | R, Q, L, V, M, I, D, A, E, | G | | | |
| | T, K, Y, C, W, S, N, F, | | | | |
| | H | | | | |
| 4 | E, W | H, M, N, V, I, A, F, L, R, S, | | | |
| | | T, K, D, G, Y, Q, C, P | | | |
| 5 | L, M | I | X | | |
| 6 | A, E | L, M, G, S, N, Q | | | |
| 7 | Y, W, I, R, Q, M, F, E, H, | L | | | |
| | V, K, T, A, C, D, N, G, | | | | |
| | S | | | | |
| 8 | A, I, S, T, Q, V, K, E | M, L, C, N, R, H, F, W, | X | | |
| | | G, D, Y | | | |
| 9 | K, H | | X | | |
| 10 | L | V, I, C, F | | X | |
| 11 | E, S, Y, H, I, M, D, A, K, | W, G, N, R, C | | | |
| | F, L, Q, T, V | | | | |
| 12 | M, L, V | T, Y, E, Q, I, R, S | X | | |
| 13 | A, L | I | X | | |
| 14 | L, S | I, M | | | |
| 15 | P, H, E, N, S, Q, A, G, T, | V, Y, K | | | |
| | M, D, R, L, I, C, F | | | | |
| 16 | I, M, A, C, H, F, E | Y, V, L | X | | |
| 17 | A, V, I, S | C, T | | X | |
| 18 | R, K, H, Y, E, G, S, F, N, | Q, A, M, C | | | |
| | D | | | | |
| 19 | N, Q, A, H, E | K, G, S, D, C, R, T, V | | | X |
| 20 | A, S | T, C | | X | X |
| 21 | H, Q, G, K, T, L, R, S, A, | C, D, F | | | X |
| | M, V, I, N, E, Y, P, W | | | | |
| 22 | T, S, C, N, Y, R, D, G, L, | H, K, V, F | | | X |
| | I, A, M, Q | | | | |
| 23 | R, K, F, A, E, T | I, Q, Y, W, L, M, H, V | | | |
| 24 | Y, W, E, Q, A, D, L, M, F, | H, K, P | | | |
| | S, R, T, I, V, N, G, C | | | | |
| 25 | E, I, D, L | V, A, M, T, Q, K, C, F, S | | | |
| 26 | A | M | | | |
| 27 | Q, N, M, K, E, W, L, Y, D, V, I, | | | | |
| | C, F, T, R, A, S, H, G | | | | |
| 28 | R, K, Y | H | X | | |
| 29 | A | | X | | |
| 30 | L, M, I | V | | | |
| 31 | F, Y | W, H, V, T, M, I, C, R | X | | |
| | | K | | | |
| 32 | I, R | M | X | | |
| 33 | A | L | | X | |
| 34 | E, S, A, Q, T, M, G, F | K, R, D, W, N, H, Y, C, L, V | | | |
| 35 | I, V | L | X | | |
| 36 | V, E, L, Y, M, N, S, K | I, C, F, A | | X | |
| 37 | A, S, C, N | L, V, M, I | | X | |
| 38 | S, D, E, G, A, Q, N, T, H, | C, L, F, V, K | | | |
| | W, M, Y, I | | | | |
| 39 | E, N | D, G, S, A, T, Q | X | | |
| 40 | A, S, C, V, T, I, Y | L, M, Q, G, H, F, E, N | | | X |
| 41 | D, G, N, E, A, S, Q, M, H, | P, F, W, T | | | X |
| | C, L, Y, K, R, V, I | | | | |
| 42 | E, D, C, S, I | N, M, V, L | | | X |
| 43 | P, K, R, Q, A, S, T, V, I, | W, Y, C, F | | | |
| | E, L, H, G, N, M, D | | | | |
| 44 | D, E, H, G, N, Q, S, A, Y, T, M, K, | | | | |
| | L, V, F, C, I, R, W, P | | | | |
| 45 | L, I, D | M, V, W, F | | X | |
| 46 | T, I, L, K, M, R, W, V, Y, | C, G | | | |
| | Q, S, F, N, H, A, D, E | | | | |
| 47 | D, E, A, Q, M, L, R, C, K, | H, Y, S, V, G, F | | | |
| | N, W, I, T | | | | |
| 48 | E, Q, D, M, A, L, I, V, S, | R, C, N, Y, H | | | |
| | T, F, W, K | | | | |
| 49 | V, I, C | L | | X | |
| 50 | Y, K, N, A, W, R, I, E, T, M, | | | | |
| | F, L, Q, H, V, C, S, D, G | | | | |
| 51 | N, K, R, M, A, L, S, Q, E, | I, F | | | |
| | V, D, T, W, H, Y, C, G, | | | | |
| | P | | | | |
| 52 | C, T, A, M, Y, V, S | I, H, Q, W, F, L, G | | X | |
| 53 | R, K, S, Q, W, I | A, H, M, Y, G | | | |
| 54 | Q, M, L, A, E, K, H, I, V, | | | | |
| | D, F, W, Y, N, S, T, C, G | | | | |
| 55 | W, D | E, F, Y, A, L, Q, C | | | |
| 56 | A, V, T, C, M, S, K, W, E, | I, L, F | | X | |
| | H | | | | |
| 57 | E, Q, D, N, A, M, S, K, H, | L, R, Y, V, G, C, F | | | |
| | T, I, W | | | | |
| 58 | Q, R, M, W, I, T, K, E, V, C, | | | | |
| | A, S, L, Y, N, F, H, D, G | | | | |
| 59 | H, K, F, Y, R, V, Q, M, A, | I, L, E | | | |
| | W, N, T, S, C | | | | |
| 60 | W, F, Y, M, L | | | X | |
| 61 | A, T, G, R, N, K, Q, S, H, C, | | | | |
| | V, I, M, L, D, E, Y, W, E, P | | | | |

TABLE 13GG
InsulinR_mb1
LIREEVQRRLEEIKQKIKEGKLDPFEAMSLLAELYELVEKLGDPELRKELEKVMEIVMRLG
(SEQ ID NO: 784)

| | | | | |
|---|---|---|---|---|
| 1 | L, E, W, T, I, K, N, P, S, Q, F, Y, | | | |
| | H, C, A, D, G, R, M | | | |
| 2 | E, G, M, L, Q, T, W, V, I, K, A, D, | | | |
| | P, H, N, R | | | |
| 3 | A, C, E, G, H, K, T, Y, R, M, Q, L, | | | |
| | V, F, D, N | | | |
| 4 | A, T, R, P, Q, M, N, F, G, D, C, E, | | | |
| | H, Y, S, V, W, L, K | | | |
| 5 | L, T, P, Q, N, M, E, G, D, K, V, H, | | | |
| | I, S, A, F, Y, R | | | |
| 6 | C, G, I, K, M, N, R, T, W, V, Y, A, | | X | |
| | F, S, Q, L | | | |
| 7 | Q, C, V, D, T, F, P, Y, L, S, A, H, | | | |
| | I, E, W, G, M, N | | | |
| 8 | D, I, K, M, L, T, R, H, N, V, C, Q, | | | |
| | A, W, G | | | |
| 9 | C, W, K, L, R, S, D, G, I, N, P, M, | | | |
| | Q, E, T, F, Y | | | |
| 10 | F, N, Q, P, R, Y, L, T, K, G, V, | | | |
| | E, M, A, C, H | | | |
| 11 | L, T, R, N, M, E, D, C, G, Q, A, S, | | | |
| | K, F, I, Y, V | | | |
| 12 | E, V, S, P, Q, I, H, L, A, G, R, W, | | | |
| | C, D, Y, F, T, N | | | |
| 13 | I, W, E, T, S, N, H, Y, A, L, M, G, | | X | |
| | Q, D, F, R, C, K | | | |
| 14 | A, V, S, N, H, L, F, E, K, C, Y, R, | | | |
| | W, M, I, D, P, T | | | |
| 15 | A, V, L, K, H, Q, I, G, Y, R, N, W, | | | |
| | C, M, D, S, E | | | |
| 16 | A, R, Q, I, N, E, C, G, K, P, Y, D, | | | |
| | M, S, W, L, T | | | |
| 17 | M, W, R, S, Q, N, L, I, H, F, G, E, | | X | |
| | K, D, T, Y, C, A | | | |
| 18 | F, I, H, L, Q, R, K, G, A, D, M, Y, | | | |
| | N, W, P | | | |
| 19 | N, W, T, S, P, Q, Y, L, E, K, I, G, | | | |
| | M, F, V, A, C, H, R | | | |
| 20 | A, W, T, N, K, H, M, F, E, C, G, L, | | | X |
| | S, P, V, I, D | | | |
| 21 | A, V, W, R, N, H, L, G, E, C, K, F, | | | X |
| | Y, D, I, Q, S, M, P, T | | | |
| 22 | N, W, R, S, P, I, L, D, E, F, T, G, | | X | X |
| | K, V, Q, H, C, A, Y | | | |
| 23 | G, M, N, P, S, R, D, W, H, E, L, Q, | X | | X |
| | A, Y, K, F | | | |
| 24 | A, G, P, M, V, T, L | X | | |
| 25 | F, W | X | | |
| 26 | E, D, R, S, H, K, M, L, Q, N, G, I, | | | |
| | T, W, A, Y, V, P | | | |
| 27 | G, M, V, Y, A, L, N, R, T, W, K, C, | | X | |
| | H, I, S, E | | | |
| 28 | M, L | X | | |
| 29 | G, H, S, T | X | | |
| 30 | I, H, N, Q, T, L, Y, A, D, K, W, F, | | | |
| | C, R, G, M | | | |
| 31 | I, V, L, C, M | | X | |
| 32 | S, A, G, R | X | | |
| 33 | A, D, G, H, S, E, N, R, V, I, Y, Q, | | | |
| | W, T, P | | | |
| 34 | A, V, W, S, Y, H, L, F, G, D, E, I, | | X | |
| | K, N, Q, C, T, R, M | | | |
| 35 | F, W, Y, I, M, H, L | X | | |
| 36 | E, D, T, I, M, Y, W, L, N, P, Q, H, | X | | |
| | F, A, V, R, G | | | |
| 37 | A, P, M, L, D, I, H, W, C, G, T, S, | | | |
| | N, F, R, V, Q, E | | | |
| 38 | A, C, E, G, M, L, N, Q, P, S, T, W, | | | |
| | V, D, F, Y | | | |
| 39 | P, E, D, L, I, W, F, H, V, S, M, A | | | |
| 40 | N, W, T, Q, Y, L, K, I, P, V, H, S, | | | |
| | R, A, G, C, F, D | | | |
| 41 | A, W, T, R, Q, N, G, E, L, Y, I, K, | | | |
| | M, H, P, S, D, V | | | |
| 42 | G, C, E, V, P, Q, Y, A, S, T, W, D, | | | X |
| | M, K, L, F, N, R, H | | | |
| 43 | N, V, T, S, P, Q, L, D, K, H, E, M, | | | X |
| | A, C, F, R, W, Y, I | | | |
| 44 | A, V, T, R, Y, K, L, F, H, P, E, M, | | | |
| | N, D, W, S, I, Q, C | | | |
| 45 | E, C, V, F, I, H, M, Y, S, R, T, P, | | | |
| | Q, W, G, A, K, N, D | | | |
| 46 | L, C, E, V, G, W, R, H, Y, S, Q, A, | X | | |
| | I, T, K, D, F, N | | | |
| 47 | N, V, P, I, R, D, E, C, G, W, A, S, | | | |
| | H, Q, F, Y, T | | | |
| 48 | A, V, W, P, N, Y, L, E, C, K, G, I, | | | |
| | S, Q, M, D, F, T | | | |
| 49 | A, V, W, R, S, P, Q, E, F, G, M, H, | | | |
| | C, D, N, K, T, Y | | | |
| 50 | A, G, N, P, L, C, H, W, T, F, Q, E | | X | |
| 51 | A, N, E, D, S, G, T, V | | X | |
| 52 | C, F, H, M, Q, P, S, K, L, R, W, E, | | | |
| | I, N, D, A | | | |
| 53 | A, Q, R, T, W, V, C, Y, K, L, N, P, | | | X |
| | F, I | | | |
| 54 | L, W, M, I, T, Y, C | | X | |
| 55 | A, F, H, M, N, S, E, T, Y, D, G, L, | | X | |
| | W, Q | | | |
| 56 | A, E, G, K, L, Q, S, R, T, Y, I, P, | | | |
| | V, N, D, M | | | |
| 57 | A, C, E, N, P, S, V, H, L, Y, F, I, | | | X |
| | M, T, G | | | |
| 58 | M, F, W, L | | X | |
| 59 | G, F, M, L, N, R, K, Q, P, S, Y, | | | |
| | W, A | | | |
| 60 | A, W, T, P, Q, Y, M, L, I, D, K, E, | | F | X |
| | R, V, S, N, G, C, | | | |
| 61 | D, N, G, E, P, H, S, Y, A, K | | X | |

TABLE 13HH
InsulinR_mb2
SKEELKERAIRLLKEGDPFEAAMLLMHLAFLTGDPRLEEVIRLLEEAFELGDPELLKEIIKLLEE
(SEQ ID NO: 785)

| | | | | | |
|---|---|---|---|---|---|
| 1 | A, E, I, G, D, Q, M, K | P, N, R, H, S, Y, L, T, V, F | | | |
| 2 | R, Q, S, G, K, P, T, N, E | H, A, V, D, F, L | | | |
| 3 | M, L, V, S, T, W, D, K, R, | G, P, I, C | | | |
| | A, H, Q, Y, E, N, F | | | | |
| 4 | G, L, F, K, M, V, Q, A | R, T, H, E, I, D, P, Y, N, C, | | | |
| | | W, S | | | |
| 5 | D, E, V, G, T, Y, K, M, L, | N, S, W, C, R | | | |
| | A, Q, F, P, I | | | | |
| 6 | R, L, H, M, T, K, C | N, A, I, Q, S, F, V | | | |
| 7 | T, S, W, G, N, L, R, I | F, D, E, A, K, M, H, Y, C, P, | | | |
| | | V, Q | | | |
| 8 | A, G, N, S, T, H, Y | D, M, Q, R, W, I, L, E | | | |
| 9 | V, I, A, S, G, T | C | | X | |
| 10 | I, T, L, V | | | | |
| 11 | D, E, Q, I, K, S, T, C, R, | F, W, G, V, H, N, L, Y | | | |
| | A, M | | | | |
| 12 | E, F, N, S, T, W, V, Y, A, | D, L, I | | | |
| | C, M, Q, R, K, H | | | | |
| 13 | M, L | | | | |
| 14 | W, Q, Y, K, T, F, R, I, S | M, H, A, V | | | |
| 15 | D, A, M, E, K, S, T, Q | N, I, L, V | | | |
| 16 | N, E, G | | | | X |
| 17 | D, N | | X | | X |
| 18 | Q, A, E, H | N, P, V, S, R, T, I, L, | X | | |
| | | C | | | |
| 19 | F, M | | X | | |
| 20 | T, S, E, G, N, A, H, Q | | X | | |
| 21 | S, A, G, C | | | X | |
| 22 | S, T, I, C | A, E, G, N, M | X | | |
| 23 | L, M | I | X | | |
| 24 | A, E, D, N, Q, S, C, M, T, | G, W, V | | X | |
| | Y, H, L, K | | | | |
| 25 | L, V, T, I | | | X | |
| 26 | T, Y, M, W, H | | X | | |
| 27 | E, D, R, Q | H, N | X | | |
| 28 | V, E, H, A, L, Y, S, T, W, | C, G | | X | |
| | Q, E, M, I | | | | |
| 29 | E, D, G, Q, N, H, S | V, A, L, C, T | | | |
| 30 | E, N, W, D, A, H, F | T, Y, G, S, M, L | X | | |
| 31 | E, L, Q, M, K, R, D | | | | |
| 32 | T, S, V, D, L, A, E | | | | |
| 33 | H, P, G, N, L, E, M, S, C, | | | | X |
| | D, A, Y, V | | | | |
| 34 | E, D, N | | | | X |
| 35 | T, V, A, S, Q, N, I, M, D, | Y, P, W, H, K, F | | | |
| | G, C, L, R, E | | | | |
| 36 | G, Y, W, Q, R, E | T, K, N, F, C, A, H | | | |
| 37 | Y, M, V, H, E, W, D, F, I, | P | | X | |
| | T, N, L | | | | |
| 38 | P, H, E, W, D | V, Y, F | | | |
| 39 | Y, F, V, D, N, H, I, E, W, | T, M, S, C, Q | | | |
| | L | | | | |
| 40 | S, T, D, H, Q, I, A, G, L, | K, R, P | | X | |
| | N, C, Y, E, M, V | | | | |
| 41 | P, S, A, N, G, Q, V, E, T, | I, L, C, F, W | | | |
| | H | | | | |
| 42 | F, I, Q, G, V, T, S, C, N, | M, R | | | |
| | P, E, Y, D, H, L, W | | | | |
| 43 | M, T, D, R, S, Q, N, W, A, | Y | | | |
| | E, H, P, F, G, K, V, C, | | | | |
| | L | | | | |
| 44 | N, T, S, C, I, V, A | M, Q, L, W | X | | |
| 45 | M, D, E, T, Q, I, N, H, C | | | | |
| 46 | W, I, L, E, V, Y | F, M, K, D, H, T | | | |
| 47 | N, E, S, G, Q | H, A, V, D, M, T | | X | |
| 48 | H, W, Y, A, G, D, P, T, V, | | | | |
| | C, E, F, N | | | | |
| 49 | L, M, I, G, P | S, V, E, W, A, Y, F, Q | X | | |
| | | T | | | |
| 50 | S, V, Y, M, H, D, G, Q, I, | K, L, C | | | |
| | F, R, P, T, N, A, E | | | | |
| 51 | G, P, Q, N | | | | X |
| 52 | Q, T, D, E, N, S, H, A, K, R, V | | | | X |
| 53 | A, D, H, M, S, R, T, Y, E, | F, P, K, L, I, V, Q | | | |
| | N | | | | |
| 54 | T, A, M, G, V, K, E, H, L, N, | | | | |
| | Y, F, D, W, I, Q, R, S, P | | | | |
| 55 | A, E, G, N, Q, S, M, D, Y, | I, L, K, H, V, W | | | |
| | P, R, F, T, C | | | | |
| 56 | E, D, M, Y, F, N | P, L, V, S, I, T | | | |
| 57 | F, Q, N, P, M, E, L, Y, I, | H, T, K, A, W, C | | | |
| | D, R, G, V, S | | | | |
| 58 | F, H, V, L, N, E, W, P, S | Y, A, D, G, I, T, C, K, R, M | | | |
| 59 | A, C, T, S, P, V, G, I | | | X | |
| 60 | E, A, S, I, G, D, F, H | Q, P, T, V, M, N | | | |
| 61 | I, N, T, L, S, V, Y, Q, E, | F, A, D | | | |
| | H, M, P, W, G, K, C, R | | | | |
| 62 | E, F, Y, M, D, S, G, T, Q | N, H, W, K, R, V | | | |
| 63 | L, M | | | X | |
| 64 | D, E, N | G | | | |
| 65 | C, D, Q, T, E, S, R, Y, A, N, | | | | |
| | M, K, L, H, F, I, V | | | | |

TABLE 13II
InsulinR_mb3
DVMEEAFTVWFQLENLAFRVDDPEQRKTVDTLSKLLQEAADRGDRELLKKVIKTARDVISKVNS
(SEQ ID NO: 786

| | | | | | |
|---|---|---|---|---|---|
| 1 | H, P, M, F, D, A, I, V, T, | S | | | |
| | L, E, N, K, Y, W | | | | |
| 2 | P, T, D, V | R, L, Y, E, M, F, Q, A | | | |
| 3 | T, I, L, N, M, F, S, H, G, Q | | X | | |
| 4 | S, Q, D, L, F, N, E, T, G | H, A | | | |
| 5 | T, M, A, D, V, K, H, E, W, | C, Y, Q, R | | | |
| | S, L | | | | |
| 6 | G, A | S | X | | |
| 7 | F, I, Y | | X | | |
| 8 | H, Y, F, A, L, N, Q, M, K | V, T, R, G, S | | | |
| 9 | L, Y, I, M, R, F | T, V, A | | X | |
| 10 | W | | X | | |
| 11 | F, I, M | | X | | |
| 12 | D, M, L, K, A, I, E, H, T, Y, | | | | |
| | S, Q, F, N, V, W | | | | |
| 13 | L, I, M | | | X | |
| 14 | N, V, T, I, E, C, Q, M, A, G | | X | | |
| 15 | G, M, Y, F, A, H, Q, E, L, | I, P, K | X | | |
| | T, S, N, D | | | | |
| 16 | I, A, M, E, T, Q, L, F, Y | S, V | | X | |
| 17 | G, W, M, R, A, H, L | | | | |
| 18 | V, D, H, M, S, W, E, F | N, I | X | | |
| 19 | C, N, Q, T, W, V, M, F, I, | D, K | | | |
| | E, H, Y, S, L, R | | | | |
| 20 | C, T, I, Q, H, M, S, L, V | Y, E | | X | X |
| 21 | G, W, S, Y, Q, T, F, I, L, | C | | | X |
| | A, V, N, R, H, E, M, K, | | | | |
| | P, D | | | | |
| 22 | T, R, K, V, H, E, L, G, D, I, | | | | X |
| | N, Y, M, Q, A | | | | |
| 23 | E, D, L, G, N, V, M, A | S, P | | | |
| 24 | S, R, P, G, K, T, I, M, N, | W, C | | | |
| | H, V, D, Y, E, A | | | | |
| 25 | M, N, F, A, S, T, V, D, P, C, | | | | |
| | W, L, K, G, H, Y, Q, E | | | | |
| 26 | G, Y, F, K, E, A, T, N, W, | D | | | |
| | I, V, S, C, H, R, M | | | | |
| 27 | R, G, I, S, N, T, M, K, H, | C | | | |
| | V, A, E, L, W, P, D | | | | |
| 28 | A, L, Q, S, K, I, V, H, R, | M, W, T | | | |
| | D, F, P, Y, G, N, E | | | | |
| 29 | C, F, M, L, I, H, V, T | Q, W | | X | |
| 30 | G, M, L, V, S, H, Y, R, W, | A, D, C, I, Q, F | X | | |
| | N, T, E, K | | | | |
| 31 | N, A, W, V, G, K, M, D, L, | H | | | |
| | E, T, F, Q, I | | | | |
| 32 | V, Q, A, W, L, Y | M, H | | X | |
| 33 | N, E, P, E, T, S, I, G, A, | V, D | | | |
| | C, L, M, R | | | | |
| 34 | N, A, E, W, V, S, Y, Q, I, | H, R | | | |
| | M, C, K, G, F | | | | |
| 35 | M, R, S, D, A, K, T, Y, V, G, I, | | | | |
| | L, Q, C, N | | | | |
| 36 | C, M | L | X | | |
| 37 | E, M, L, E, K, N, T, A, H, R, S, | | X | | |
| | Q, G, W | | | | |
| 38 | D, F, R, T, S, N, H, G, K, E, M, | | X | | |
| | V, L, C | | | | |
| 39 | S, C, M, T, A, L, Y, V, H, | E, F, Q, K | | X | |
| | N, G | | | | |
| 40 | N, S, A, D, Y | G | X | | |
| 41 | E, D, H, S, T, A | | X | | |
| 42 | W, H, N, I, A, V, K, T, M, | Y, S, F, E | | | |
| | L, D, Q, R, C | | | | |
| 43 | Q, K, L, A, P, N, D, E, M, G, S, | | | | X |
| | W, R, T, F, I, Y | | | | |
| 44 | N, E, S, L, D, K | R | | | |
| 45 | Q, I, Y, L, E, D, W, V, F, | S, A | | | |
| | H, M, R, G, P | | | | |
| 46 | Q, V, W, P, D, Y, F, L, T, C, R, | | | | |
| | I, S, E, A, G, K | | | | |
| 47 | N, I, W, F, Y, A, R, V, T, | M, Q, L, H | | | |
| | D, G, C | | | | |
| 48 | I, A, C, L | | X | | |
| 49 | A, Y, D, S, W, R, Q, H, E, M, F, | | | | |
| | K, T, G | | | | |
| 50 | M, L, T, D, H, N, Q, R, K, | V | | | |
| | E, Y, A, W, G, I | | | | |
| 51 | A, R, C, T, Q, I, L, E, F, Y, M, | | | X | |
| | K, V, N, W, S, G | | | | |
| 52 | M, W, L, S, V, C, K, I, T, A | | | | |
| 53 | D, S, F, N, Y, I, H, C, R, | L, W, M, E, V | | | |
| | K, A, G | | | | |
| 54 | D, W, C, L, I, H, Y, F, Q, M, R, | | | | |
| | T, V, S, N, A, K | | | | |
| 55 | V, S, G, T, C, A, I | | | | X |
| 56 | E, K, V, G, H, F, I, L, W, | Y | | | |
| | M, Q, R, T, D | | | | |
| 57 | S, E, R, V, E, N, I, W, Q, | G, L | | | |
| | K, T, A, M, D, Y | | | | |
| 58 | M, Q, K, Y, N, F, C, H, L, | W, R | | X | |
| | V, E, A | | | | |
| 59 | F, Y, C, M, I, Q, L, T, W, V, E, | | | | |
| | H, S | | | | |
| 60 | D, H, N, T, W, V, I, G, P, | S, K | | | |
| | L, R, Q, E, M, Y | | | | |
| 61 | H, M, F, Q, L, S, C, Y, G, T, N, | | | | |
| | K, E, W, R, D, I, A, P, V | | | | |
| 62 | C, T, I, W, A, L, G, K, M, | F, Q, H | | X | |
| | N, S, E, D, V | | | | |
| 63 | I, M, Q, S, P, R, K, W, L, | E, F, N, H, C | | | |
| | D, G, T | | | | |
| 64 | A, K, N, R, E, M, F, I, Q, | H, L, W, C, G, T | | | |
| | Y, V, S | | | | |

TABLE 13JJ
InsulinR_mb4
SELLERILRLLKEGNPEEAEEVARELLERTGDPRVEALVSLIEELLRTGDPFYELFVEMILRELR
(SEQ ID NO: 787)

| | | | | | |
|---|---|---|---|---|---|
| 1 | M, F, D, R, K, G, S, T, N, E, W, Q, | | | | |
| | H, Y, L | | | | |
| 2 | S, Y, T, D, G, M, E, A, K, F, I, R, | | | | |
| | H, Q, W, L, N, C | | | | |
| 3 | P, K, H, F, I, E, N, G, L, | A, R, D, W, Y | | | |
| | T, M, S, V, Q | | | | |
| 4 | P, V, A, L, C, M, F, I, W, | E, G, Q, T, D | | | |
| | S | | | | |
| 5 | T, N, R, E, L, D, Y, A, Q, | C, W, G | | | |
| | V, S, H, P, F, M | | | | |
| 6 | V, N, I, Q, K, D, G, R, M, | W | | | |
| | L, S, A, H, E, Y, C, F, | | | | |
| | T, P | | | | |
| 7 | I, C, L, M, T, V, A, P, Y | | | X | |
| 8 | T, A, E | G, F, V, D, N, C, M, R, H, I, | | | |
| | | L, S, P, W, K, Y, Q | | | |
| 9 | L, M, D, W, R, V, F, E, C, Q, I, Y, | | | | |
| | H, K, T, A, P | | | | |
| 10 | A, S, F, M, L, Y, H, C, N, K, E, W | | | X | |
| 11 | W, C | F, M, V, L, T, I | | X | |
| 12 | E, N, T, G, Q, K, M, D, Y, | A, W, S, V, I, C | | | |
| | R, H, L | | | | |
| 13 | Q, K, A, E, S, T, V, M, G, D, N, Y, | | | | |
| | L, F, R | | | | |
| 14 | G, N, H, K, E, D, S, L | | | | X |
| 15 | C, I, A, D, F, L, N, E, S, M, Q, Y, | | | | X |
| | V, R, W, K | | | | |
| 16 | W | M, K, G, F, A, L, Q, P, I, V, | | | |
| | | N, Y, T, H, S | | | |
| 17 | Y, L, R, K, E, V, M, G, F, W, I, S, | | | | |
| | N, H, D, Q, A, C, T, P | | | | |
| 18 | G, S, D, M, K, E, H, L, Q, | N | | | |
| | R, V, A, C, F, T, P | | | | |
| 19 | A, C | | | X | |
| 20 | A, T, G, Q, H, E, S, V, N, R, D, M, | | | | |
| | I, L, C, Y, F, K, W | | | | |
| 21 | A, N, C, I, R, M, P, Q, E, | T, G, S, W, K | | | |
| | F, D, H, L, Y | | | | |
| 22 | L, S, V, R, C, W, E, Y, M, | T, P, D | | X | |
| | A, I, G | | | | |
| 23 | A, S, G, C, K | | | X | |
| 24 | R, V, Q, F, L, C, K, A, S, I, E, N, | | | | |
| | Y, M, W | | | | |
| 25 | K, T, I, A, S, Q, E, L, R, | W | | | |
| | H, N, V, F, Y, C, G, D | | | | |
| 26 | W, L, M, F, H, V, Y | | | X | |
| 27 | W, F, Q, Y, H, L, A, S | M, N, K | | | |
| 28 | K, G, A, Q, W, N, E, Y, V, | D, C | | | |
| | S, H, R, T, F, L, I | | | | |
| 29 | N, L, A, R, H, K, C, M, E, | E, V, T | | | |
| | Q, W, D, G | | | | |
| 30 | D, T, C, N, S, G, E, Y, I, M | | | | |
| 31 | Q, N, H, A, T, G, R, E, F, S, K, Y, | | | | X |
| | W, C, M, P, I, D, V, L | | | | |
| 32 | D, S, N, E | | | | X |
| 33 | Y, A, Q, E, M, F, L, I, V, | T | X | | |
| | P, H, K, N, S, W, G, R | | | | |
| 34 | T, E, S, N, H, A, R, K, M, | Q, V, W | X | | |
| | Y, G | | | | |
| 35 | F, V, A, S, H, Y, I, M, W, G | | | X | |
| 36 | E, H, D, R, Q, S, F, N | | | | |
| 37 | A, G, N, H, D, S, R, I, M, Q | | X | | |
| 38 | M, T, L, A, S, G, C | | | X | |
| 39 | H, C, V, A | Y, K, G | | | |
| 40 | E, D, T, N, G | S, A | X | | |
| 41 | N, S, E, Q, A, T, C | D, M, L, H, Y, V, I, R | X | | |
| 42 | F, L, M, I, R | | | X | |
| 43 | N, D, Y, E | S, Q, G, K, T, H, R | | | |
| 44 | D, E, T, Q, N, A, S, V | | X | | |
| 45 | E, H, Y, W, G, K | I, A, M, L, D, F, V, N, S, P, Q | | X | |
| 46 | N, D, V, H, Y, C, G, W | F, A, S, P, T, I, L, R, K, M, E | | | |
| 47 | N, S, A, H | T, V, E, R, K, L, Q, G, I, M, | | | |
| | | F, W, Y, D | | | |
| 48 | S, N, G, T, A, Q, V, M, K, F, H, R, C | | | | |
| 49 | S, A, Q, N, G, M, E, L, T, | R, H | | | X |
| | D, K, V | | | | |
| 50 | D, G | | X | | X |
| 51 | M, P, K, T, L, D, G, N, Q, | R | X | | |
| | E, S | | | | |
| 52 | F, Y | | X | | |
| 53 | Y, H | | X | | |
| 54 | N, M, L, G, W, H, E, Q, T, | K, D, A | | | |
| | S, F, Y, R | | | | |
| 55 | Y, H, F, E, P, S, A, L, N, | G, T, R, K | X | | |
| | Q, V, D | | | | |
| 56 | L, M, F | | X | | |
| 57 | V, I, C, L, M, T, Q | | | X | |
| 58 | V, M, H, Y, T, L, D, A, F, C, W, E, | | | | |
| | G, N, S, Q, I, R | | | | |
| 59 | E, D, M | K, L, N | X | | |
| 60 | T, S | V, A, I, L, M, C, W | X | | |
| 61 | F, L, C, I, G, M, W, A, D, V, E, S | | | | |
| 62 | E, F, L, Y, V, P, M, G, T, | A, W, R, N, S, D | | | |
| | K, I, Q | | | | |
| 63 | D, E, N | G | X | | |
| 64 | L, F, W, Y, M, H, D | | | X | |
| 65 | P, Y, H, L, E, R, T, I, W, | C | | | |
| | K, F, V, D, M, Q, S, G, | | | | |
| | N, A | | | | |

TABLE 13KK
InsulinR_mb5
DEELMELVYEAVEKNDPELLFEAWMELASLLDETGDPKIEEALGLLQQVDGGNPDAGRRIKELFK
Optimized SEQ ID NO: 788

| | | | | | |
|---|---|---|---|---|---|
| 1 | K, T, E, D, Q, H, L, P, S, | | | | |
| | N, R, V, F, G, C, W, M, A, I | | | | |
| 2 | W, A, R, P, L, K, H, E, T, | G, V | | | |
| | D, C, Y | | | | |
| 3 | P, A, Y, E, M, L, C, S, I, | | | | |
| | F, K, Q, G, T, R, N, W, D, H, V | | | | |
| 4 | Q, D, M, E, K, R, G, N, H, | | | | |
| | S, Y, L, I, V, A, F, C | | | | |
| 5 | S, R, P, M, K, Q, E, G, D, | L | | | |
| | W, T, A, H, N, I, V, F | | | | |
| 6 | Q, V, D, R, I, P, G, A, E, F, | | | | |
| | N, Y, M, S, T, H, W, L, K | | | | |
| 7 | W, I, S, F, A, R, V, H, T, | C, L, Y, G, E, N | | | |
| | Q, K | | | | |
| 8 | A, V, T, C, M, I, L, F, S | | | X | |
| 9 | M, A, I, T, Q, L, K, F, S, | D, C, H, G | | | |
| | N, E, W, Y, R, V | | | | |
| 10 | S, Y, P, D, R, E, A, F, W, K, | | | | |
| | V, H, G | | | | |
| 11 | G, S, A, P, V, R, M, Y, K, | | | X | |
| | H, T, N, C, F, I, D, Q, L | | | | |
| 12 | I, V, Y, M, C, N, S, T, F, | | | X | |
| | A, Q, L | | | | |
| 13 | I, T, E, D, R, V, W, Q, N, | | | | |
| | L, K, A, Y, C, G, M, H, F, S | | | | |
| 14 | I, C, M, K, Y, R, H, L, Q, | | | | X |
| | E, T, N, W, P, A, D, S, F, G | | | | |
| 15 | G, A, S, N, E, V, Q, H, D, | | | | X |
| | P, R, T, M, K, L, C | | | | |
| 16 | E, V, D, N, S, H, I, A, K, | | | | X |
| | Q, M, T, R | | | | |
| 17 | S, T, H, K, F | N, P, A, Q | X | | |
| 18 | M, L, F, Y | V, P, S, I, R, E, N, Q, T, D | | | |
| 19 | Y, M, A, F, E, V, L, T, D, | | | | |
| | I, G, N, P, R, S | | | | |
| 20 | M, Q | L, G | X | | |
| 21 | F, V, M | | X | | |
| 22 | D | N, R, A, E, P, Q, V, G, | X | | |
| | | H, M | | | |
| 23 | C, L, A, V, K, Y, S, M, I, | | | | X |
| | G, F, W, R, T, Q | | | | |
| 24 | W, Y | | X | | |
| 25 | I, M, V, A, F, L, C, T | | X | | |
| 26 | A, G, S, D, N, K, M, E, F, | T | | | |
| | Q, Y, C, R, W, H, L, I, | | | | |
| | V | | | | |
| 27 | G, A, F, S, C, M | T, L, W, Y, H | | X | |
| 28 | C, A, T, V, W, Q, M, S, E, | | X | | |
| | I, G | | | | |
| 29 | G, P, L | A, S, C, V, D, R, M, E | X | | |
| 30 | C, R, G, I, Y, K, S, F, Q, | | | | |
| | L, D, W, M, T, E, A, V, N | | | | |
| 31 | A, G, H, S, Q, N, L, D, T, | | X | | |
| | I, Y, M, W, V | | | | |
| 32 | P, D, Y, N, A, G, M, T, S, | | X | | |
| | E, V, Q, I | | | | |
| 33 | D, E, G, P, A, N, H, F, V, | C | | | |
| | T, Q, Y, M, S, R, I, K, | | | | |
| | W | | | | |
| 34 | D, Y, N, E, G, H, Q, A, T | K, I, S | | | |
| 35 | D, Q, S, T, P, E, G, N, I, | H | | | X |
| | W | | | | |
| 36 | D, S, P, K, E, Q, T, A, Y, | | | | X |
| | H, N, G, I, R | | | | |
| 37 | E, P, R, K, A, I, G, M, H, | | | | |
| | Q, C, Y, T, D, V, L, S, W, F, N | | | | |
| 38 | V, R, Y, A, I, H, Q, G, K, | | | | |
| | E, T, D, W, M, C, F, L | | | | |
| 39 | I, N, Q, R, M, T, F, C, L, | | | X | |
| | Y, V, W, H, K, D, E | | | | |
| 40 | E, M, S, R, Y, T, P, F, D, | | | X | |
| | V, N, L, G, A, Q, K, H, I, | | | | |
| | W | | | | |
| 41 | D, E, M, S, K, H, T, N, L, | | | | |
| | I, P, Y, R, V, A, G, W, F, Q, C | | | | |
| 42 | G, A, M, I, T, L | E, C | | X | |
| 43 | M, Q, L, T, I, V, A, S, F | | | | |
| 44 | W, I, V, S, K, F, L, D, N, | Q, P, C, G | | | |
| | A, E, M, H, R, T, Y | | | | |
| 45 | D, L, W, Y, A, I, F, E, H, | | | | |
| | N, S, Q, C, M, V | | | | |
| 46 | M, L, I, T, V, K, C, Y, F | | X | | |
| 47 | V, E, P, N, Q, M, T | R, I, A | X | | |
| 48 | E, Q, L, D, A, G, W, K, V, | | | | |
| | H, I , C, R, S, N, T, M, P, Y | | | | |
| 49 | M, L, V, E, F, T, H, I, Q, | | | X | |
| | N, D, W | | | | |
| 50 | D, Y, E | | X | | |
| 51 | E, D | G, A, H, W, N, R, L, Q, S | | | X |
| 52 | G, Y, P, K, H, A, Q, R, W, | | | | X |
| | D, E, S, M, L, N, F, V, C | | | | |
| 53 | N, D, V, Y, C, S, K, A, H, I, | | | | X |
| | E, R, F, Q, G, W, L, M, P | | | | |
| 54 | E, D, T, L, S, C, Y, P, G, Q, | | | | |
| | K, I, N, V, H, A, F, M, R, W | | | | |
| 55 | I, M, Y, F, C, D, E, T, A, S, | | | | |
| | R, Q, H, L, K, W, V, G | | | | |
| 56 | A, T, I, S, N, G, P, V, E, D, | | | X | |
| | Q, L, M | | | | |
| 57 | S, H, G, E, I, P, A, T, F, | Y, Q, R, M, C, N, L | | | |
| | K | | | | |
| 58 | G, W, V, F, H, R, T, L, P, | | | | |
| | Y, I, D, E, A, C, N, S, Q | | | | |
| 59 | D, M, R, I, G, N, F, C, S, | | | | |
| | W, Y, A, T, V, K, Q, H, E, L | | | | |
| 60 | V, I, A, Y, W, L, S, T, C, F, | | | X | |
| | M, G | | | | |
| 61 | F, D, H, I, M, Y, V, K, W, N, | | | | |
| | E, T, R, G, Q, P, L | | | | |
| 62 | Y, V, N, L, W, S, I, G, H, | | | | |
| | E, Q, T, K, R, C, F, D, M, A, P | | | | |
| 63 | G, V, N, E, I, L, H, D, C, | | | | |
| | T, Y, Q, F, W, A, K, S, P, R, M | | | | |
| 64 | L, V, Q, I, C, R, S, F, K, | E | | | |
| | Y, H, T, N | | | | |
| 65 | G, P, Y, V, S | Q, A, N, K, T, D, W, I, E, F, L | | | |

TABLE 13LL
InsulinR_mb6
DPFTAMELVARVFELALEKNDEELQKEAETLMEIVIKAAQNNDEEKVKEVIKRAKELLSKS
(SEQ ID NO: 790)

| | | | | | |
|---|---|---|---|---|---|
| 1 | D, E, I, L, Y, G, S, P, N | R | | | |
| 2 | P, G, A | S | X | | |
| 3 | F, W | | X | | |
| 4 | E, H, N, S, T, Q, W, R, V, F, | | | | |
| | L, C, M, A, K | | | | |
| 5 | A, C, S, V, G, L, T | I | | X | |
| 6 | L, M, V | | X | | |
| 7 | E, P, G, Q | | X | | |
| 8 | L, E, Y, D, N, W, I, G, M, T, | | | | |
| | Q, H, A, F, S, V, C | | | | |
| 9 | M, V, A, I, T, G, C, S, L, F, Q | | | X | |
| 10 | G, A | S | X | | |
| 11 | D, L, R, N, P, M, S, B, C, V, | | | | X |
| | H, K, W, T | | | | |
| 12 | G, M, L, N, T, V, Q, A, F, | D | | X | |
| | Y, C, I, S | | | | |
| 13 | F, L, I, A, Q, E, T | | X | | |
| 14 | E, D | | X | | |
| 15 | D, M, L, I, Y, N, P, A, S, | G | | | |
| | K, V, C, R, W, F, H | | | | |
| 16 | E, A, Q, G, M, L, W, S, N | V | | X | |
| 17 | D, L, V, E, I, M, Y, Q, G, F, | | X | | |
| | A, H, P, N, T | | | | |
| 18 | E, P, D, G, K, T, V, Y, A, Q, | | X | | |
| | W, S | | | | |
| 19 | L, T, R, Y, K, D, P, M, H, S, | | | | X |
| | C, N, F, W, Q, V, E, I, A, G | | | | |
| 20 | E, I, L, N, S, A, V, Y, M, Q, | | | | X |
| | H, W, D, P, G | | | | |
| 21 | E, F, Q, D, R, G, M, S, T, | | | | X |
| | K, P, C, I, H | | | | |
| 22 | A, D, E, N, W, V, Y, F, G, | T | | | |
| | L, S, I, Q, R | | | | |
| 23 | G, F, E, W, H, R, Y, Q, M, D, | | | | |
| | S, V | | | | |
| 24 | C, I, W, Y, L, V, M, A, S, F, | | | | |
| | H, E, D, P, N, T | | | | |
| 25 | E, D, N, Q, H, P, A, M, S, G, | | | | |
| | L, Y, C, I, W, T | | | | |
| 26 | L, V, W, T, S, P, N, M, K, | Q | | | |
| | Y, D, C, R, E, A, H, I, | | | | |
| | F, G | | | | |
| 27 | A, H, R, T, E, L, S, W, Y, | Q | | | |
| | C, G, M, N, D Q | | | | |
| 28 | P, A, G, E, D, C, M, T, N | | | X | |
| 29 | E, Q, D | | X | | |
| 30 | A, L, Y, F, M, T, H, K, N, W, | | | | |
| | I, G, V, S, C, D, Q, R | | | | |
| 31 | A, C, V, L, W, G, F, E, T, | H | | X | |
| | D | | | | |
| 32 | M, L, V | | X | | |
| 33 | E, D, N | | | | |
| 34 | L, I, D, A, R, P, E, Q, S, | | | | |
| | G, F, T, N, C | | | | |
| 35 | I, L, V, T, M, S | H | | X | |
| 36 | L, I, G, Y, S, W, D, T, E, Q, C | | X | | |
| 37 | K, C, G, I, M, L, Q, S, V, | F | | | |
| | T, N, H , P, E, Y, W, A, | | | | |
| | R | | | | |
| 38 | C, E, Q, A, G, I, L, N, S, | W | | X | |
| | M, D, R, F, H, V, Y | | | | |
| 39 | A, S, G, N | | X | | |
| 40 | Q, D, T, H, E, P, E, Y, W, | I | X | | |
| | M, V, N, A | | | | |
| 41 | N, E, W, F, P, G, V, S, M, A, | | X | | X |
| | C, K, Y, T, R, D, H, Q, L | | | | |
| 42 | I, L, P, N, A, T, V, M, S, W, | | X | | X |
| | D, Y, F | | | | |
| 43 | D, T, S, V, P, A, M, E, I, F, | | | | |
| | W, G, R, N, Q, H, Y, K, C, L | | | | |
| 44 | E, V, T, S, F, Y, L, N, A, I, | | | | |
| | W, Q, R, P, G, M, D, H, C | | | | |
| 45 | E, V, I, M, L, R, Q, D, N, P, | | | | |
| | S, H, G, Y, C, T, W, F | | | | |
| 46 | A, W, R, S, P, Y, H, K, E, M, | | | | |
| | G, C, D, V, L, N, I, F, Q, T | | | | |
| 47 | P, V, L, I, F, A, G, T, C, N, S | | | | |
| 48 | G, M, N, P, K, E, L, W, A, | I | | | |
| | D, R, F, H, Y, C, S | | | | |
| 49 | L, V, T, P, K, H, E, I, G, D, | | | | |
| | N, F, S, C, Y, W, A, R, M, Q | | | | |
| 50 | V, M, L, C, A, Q, S, R, E, | P | | X | |
| | G, W | | | | |
| 51 | L, P, I, V, C, S, Y, N, W, K, | | | | |
| | M, T | | | | |
| 52 | N, T, P, Q, M, K, H, V, G, R, | | | | |
| | A, I, L, Y, D, C, W | | | | |
| 53 | K, F, G, R, D, T, C, M, V, H, | | | | |
| | N, P, Q, S, I, E, Y, A | | | | |
| 54 | A, E, L, S, T, Q, I, D, V, G, | | | X | |
| | N, Y, C, H, M | | | | |
| 55 | A, E, D, W, K, H, V, S, Q, P, | | | | |
| | M, I, C, Y, R, F | | | | |
| 56 | E, T, P, Q, I, W, M, A, H, K, | | | | |
| | C, Y, F, R, S, V, G, L, D, N | | | | |
| 57 | A, S, P, L, D, C, R, I, N, G, | | | X | |
| | T, K, V, W, H, Y, Q | | | | |
| 58 | W, L, V, D, A, E, G, Y, H, I, | | | | |
| | P, S, F | | | | |
| 59 | M, L, N, P, T, S, I, F, Y, A, | | | | |
| | R, G, H, Q, V, E | | | | |
| 60 | K, N, W, F, S, L, E, I, V, | Q | | | |
| | C, H, Y, P, G, A, R, D | | | | |
| 61 | S, C, W, P, T, F, K, N, D, Y, | | | X | |
| | G, I, V, E, L, M, Q, A, R | | | | |

TABLE 13MM
InsulinR_mb7
DPFTAMELVARVFELALEKNDEELQKEAETLMEIVIKAAQNNDEEAVKEVIKRAKELLSKS
(SEQ ID NO: 791)

| | | | | |
|---|---|---|---|---|
| 1 | D, E, G, F, S, P, Q, Y, N, M, K | | | |
| 2 | P, G, N, A | X | | |
| 3 | F, W | X | | |
| 4 | T, E, N, S, Q, I, E, A, H, K, | | | |
| | Y, V, D, L, R, M, W, C | | | |
| 5 | A, G, C, M, L, S, T, Q, F | | X | |
| 6 | L, M | X | | |
| 7 | E, P, G, D, N | X | | |
| 8 | G, L, E, Q, D, M, W, H, F, V, | | | |
| | C, N, I | | | |
| 9 | V, T, C, A, F, I, N, Q, Y, S, | | X | |
| | G, L, M | | | |
| 10 | A, G, S, R | X | | |
| 11 | A, V, W, T, S, N, L, C, I, R, | | | |
| | Y, D, Q, K, F, P, H, G, E | | | |
| 12 | G, N, S, V, I, M, Q, Y, W, C, | | X | |
| | F, L, T, H, A | | | |
| 13 | F, I, Y, L, W, V, S, M | X | | |
| 14 | E, D | X | | |
| 15 | L, W, F, K, Q, Y, C, R, H, S, | | | |
| | T, V, A, G, D, M, E, N, P, I | | | |
| 16 | G, N, A, Q, C, E, S, D, M | | X | |
| 17 | I, H, N, Y, L, M, V, F, E, S, A, | X | | |
| | D, Q, G | | | |
| 18 | E, F, L, P, Q, Y, M, H, A, V, G, | X | | |
| | D, S | | | |
| 19 | K, C, D, G, H, N, I, T, F, M, W, | | | X |
| | A, P, V, E, L, Y, R | | | |
| 20 | N, Q, Y, I, F, E, K, H, G, P, S, | | | X |
| | W, T, R, L, D, M, V | | | |
| 21 | N, G, D, A, H, W, I, C, L, Y, Q, | | | X |
| | R, E, M, T, S, P, V | | | |
| 22 | E, V, F, L, P, T, D, M, W, R, C, | | | |
| | Y, S, N, Q, H, A, G, I | | | |
| 23 | A, R, Y, M, E, D, I, V, G, Q, S, | | | |
| | T, N, H, W, P, K, L, F | | | |
| 24 | L, W, E, P, T, N, I, A, D, H, S, | | | |
| | M, Y, G, K, C, R | | | |
| 25 | D, L, Q, Y, T, I, H, N, M, E, V, | | | |
| | S, G, K, P | | | |
| 26 | A, V, P, Y, K, D, E, C, I, H, Q, | | | |
| | W, G, L, N, T, S, M | | | |
| 27 | A, V, Y, K, E, G, D, W, I, P, H, | | | |
| | L, M, N, F, T, R, Q, S | | | |
| 28 | A, D, P, G, S, V, E, L, N, M, Q, | | X | |
| | I, Y, H | | | |
| 29 | D, E, N, G | X | | |
| 30 | A, S, P, F, T, M, G, I, Y, C, | | | |
| | H, V, W, L, D, K, Q, N, E, R | | | |
| 31 | G, L, W, E, F, H, I, Q, C, A, | | X | |
| | N, K, M, S, V, D | | | |
| 32 | M, V, I, L, W | X | | |
| 33 | D, E, N, S | | | |
| 34 | I, E, Y, M, S, V, N, W, D, K, P, | | | |
| | F, R, A, C, H, Q, T | | | |
| 35 | V, I, M, L, E, C, F, D, N, H | | X | |
| 36 | N, T, I, S, G, A, V, M, D, L, Q | X | | |
| 37 | K, R, G, F, Q, L, Y, T, S, M, N, | | | |
| | A, E, D, W, H, I, P, V | | | |
| 38 | C, S, N, L, E, A, H, M, Y, Q, T, | | X | |
| | D, G, F, I, V, R | | | |
| 39 | G, S, A | X | | |
| 40 | Q, V, T, N, Y, H, P, M, E, S, | X | | |
| | D, A, K, F, L, I , G, W | | | |
| 41 | A, V, T, S, H, N, E, F, L, D, P, | X | | X |
| | Y,I , K, G, M, Q, C | | | |
| 42 | F, I, P, N, M, L, W, Y, S, D, V, | X | | X |
| | E, H, G | | | |
| 43 | D, V, K, Q, R, T, Y, I, M, G, N, | | | X |
| | E, H, S, P, C, A, L, F | | | |
| 44 | A, V, T, R, Q, M, E, I, H, F, P, | | | |
| | L, W, G, D, Y, S, N, K, C | | | |
| 45 | A, V, W, T, R, Q, N, L, H, F, K, | | | |
| | E, M, G, S, P, D, C, I, Y | | | |
| 46 | A, E, W, R, S, P, H, K, Y, C, G, | | | |
| | M, D, V, L, N, I, F, Q | | | |
| 47 | A, G, V, S, C, M, T, H, L, I, P | | | |
| 48 | K, V, T, G, I, R, M, P, F, E, | | | |
| | A, S, L, D, W, C, N, Y, H, Q | | | |
| 49 | E, R, K, P, A, I, D, V, N, T, | | | |
| | L, F, S, G, C, H, Q, W, M, Y | | | |
| 50 | D, L, P, V, A, C, Q, H, M, N, | | X | |
| | S, T, Y, G | | | |
| 51 | N, I, G, S, V, W, D, H, L, A, C, | | | |
| | P, F, Y, Q, E, R, K, T | | | |
| 52 | A, T, R, P, F, K, Q, D, C, G, | | | |
| | L, Y, N, S, M, V, E, H, I, W | | | |
| 53 | R, T, E, D, P, I, H, K, V, N, M, | | | |
| | S, W, A, Q, F, C, G, L | | | |
| 54 | A, E, D, H, P, Y, R, M, W, G, V, | | X | |
| | N, Q, I, T, K, C, L | | | |
| 55 | N, V, S, L, H, K, F, G, D, P, T, | | | |
| | W, M, I, Y, R, C, Q, A | | | |
| 56 | A, R, S, P, L, M, E, F, G, K, Q, | | | |
| | I, T, Y, N, W, V, D | | | |
| 57 | C, Q, L, R, K, W, M, A, F, T, E, | | X | |
| | H, S, Y, V | | | |
| 58 | V, L, S, I, M, N, K, F, H, Q, Y, | | | |
| | C, W, E, P | | | |
| 59 | L, R, P, Q, K, S, D, H, I, F, G, | | | |
| | N, W, M, C, Y, T | | | |
| 60 | K, R, S, Y, N, T, D, Q, E, P, I, | | | |
| | H, A, F, W, M, V, C, L, G | | | |
| 61 | L, V, P, N, I, S, E, Y, H, C, D, | | X | |
| | R, A, T, W, Q, K, G, F | | | |

TABLE 13NN
InsulinR_mb8
DPFTAMELVARVFELAVEKNDEELAKEAETIMEIVMKAAENNDEEAVKEVIKRAKELLSKS
(SEQ ID NO: 792)

| | | | | |
|---|---|---|---|---|
| 1 | A, V, T, Q, Y, L, I, D, G, P, F, | | | |
| | H, M, K, E, S, W, R | | | |
| 2 | P, I, G, A | X | | |
| 3 | W, F | X | | |
| 4 | A, V, W, S, N, M, L, E, K, T, Q, | | | |
| | C, P, R, Y, F, H, D | | | |
| 5 | A, T, M, C, G, F, I | | X | |
| 6 | M, I | X | | |
| 7 | H, S, E, N, A, D, M, T, L, F, G, | X | | |
| | P | | | |
| 8 | G, M, N, S, R, Y, L, K, E, Q, C, | | | |
| | A, D, H, F, T | | | |
| 9 | A, V, I, L, S, F, Y, C, M, G, W, | | X | |
| | T | | | |
| 10 | G, A, S, W, C | X | | |
| 11 | R, D, H, K, M, S, N, Q, W, C, E, | | | |
| | A, Y, P, F, T, L, V | | | |
| 12 | A, C, F, I, S, T, W, V, G, Y, M, | | X | |
| | N, L, Q | | | |
| 13 | C, Y, F, W, T, M, A, D, V, L, I, | X | | |
| | H | | | |
| 14 | E, T, D, A, G, Q, Y, S, I | X | | |
| 15 | A, R, Q, N, Y, H, L, G, D, C, I, | | | |
| | K, F, E, T, S, W | | | |
| 16 | C, W, T, S, Y, A, G, E, L, V, Q, | | X | |
| | F, N, K, R, D, I, P | | | |
| 17 | A, I, H, M, L, P, W, Y, V, T, Q, | X | | |
| | E, C, N, G, D | | | |
| 18 | N, W, P, Y, L, H, E, D, C, I, R, | | | |
| | G, F, A, V, M, T, Q, S | | | |
| 19 | A, T, S, P, K, D, F, I, H, Y, R, | | | X |
| | N, V, G, C, L, W, Q, M | | | |
| 20 | N, E, P, Y, H, F, Q, A, M, I, D, | | | X |
| | W, R, K, G, S, T | | | |
| 21 | L, V, S, P, D, G, F, K, R, T, Y, | | | X |
| | W, N, I, C, H, M, Q, A, E | | | |
| 22 | A, V, G, N, D, E, L, R, Q, T, K, | | | |
| | P, S, H, Y, C, M | | | |
| 23 | L, V, R, Q, N, Y, E, H, T, K, I, | | | |
| | W, M, D, S, A, F, G | | | |
| 24 | L, C, W, S, F, A, D, K, E, I, M, | | | |
| | T, N, G, V, Q, H | | | |
| 25 | C, W, R, S, P, Q, Y, L, A, H, I, | | | |
| | F, E, M, N, V, T, D, K | | | |
| 26 | E, L, S, K, H, R, V, N, C, G, A, | | | |
| | Y, T, M | | | |
| 27 | A, T, R, S, Q, M, N, I, F, E, W, | | | |
| | L, H, K, D, G, P, V, Y | | | |
| 28 | F, I, A, Q, S, L, N, V, G, D, M, | | X | |
| | Y, C, R, T | | | |
| 29 | N, E, G, C, T, Y, L | X | | |
| 30 | A, W, Q, N, H, M, D, T, E, C, V, | | | |
| | I, K, P, R, S, F, L, G, Y | | | |
| 31 | E, F, Q, R, Y, L, D, I, C, G, A, | | X | |
| | V, S, H, N, K | | | |
| 32 | M, I, V, W, L, Y | X | | |
| 33 | D, E, M, T, A, H, L, G, I , K, | X | | |
| | Q, Y, F | | | |
| 34 | I, C, E, D, W, Q, H, K, M, A, P, | | | |
| | V, N, S, Y, L, R, F, T, G | | | |
| 35 | E, V, F, I, T, Q, L, M, H | | X | |
| 36 | G, L, S, T, V, M, I, N, W, D, A, | X | | |
| | Q | | | |
| 37 | C, M, T, K, S, E, R, V, G, W, F, | | | |
| | D, H, Q, A, L | | | |
| 38 | C, N, H, L, D, A, K, M, Q, S, T, | | X | |
| | R, I, Y, V, P, F, E | | | |
| 39 | N, A, S, G | X | | |
| 40 | D, T, E, N, P, Y, G, Q | X | | |
| 41 | N, V, R, D, G, P, L, H, M, Q, I, | X | | X |
| | F, S, T, K, Y, C, E, A, W | | | |
| 42 | N, D, F, I, H, V, Y, P, W, R, E, | | | X |
| | G, Q, L, S, T, A | | | |
| 43 | A, T, R, S, Q, N, M, L, H, I, C, | | | X |
| | D, G, W, V, K, E, F, Y, P | | | |
| 44 | L, V, W, R, S, Q, N, Y, E, G, D, | | | |
| | M, H, F, P, T, C, A, K, I | | | |
| 45 | A, V, W, R, S, P, Y, M, L, F, G, | | | |
| | K, E, D, Q, N, I, H, C | | | |
| 46 | C, R, P, N, K, M, F, D, E, I, | | | |
| | A, T, H, W, G, V, S, L | | | |
| 47 | C, L, P, V, S, M, T, H, G, F | | | |
| 48 | A, S, N, K, I, Q, G, M, C, D, Y, | | | |
| | H, T, P, V, F, E, W, L | | | |
| 49 | A, V, W, P, Q, K, E, I, F, G, M, | | | |
| | N, S, H, Y, L, C, R, D, T | | | |
| 50 | M, P, Q, L, I, V, D, G, E, C, S, | | X | |
| | F, Y, W, A, N, T, H | | | |
| 51 | A, T, P, N, I, F, V, D, W, S, R, | | | |
| | H, M, Y, K, G, L, C, E | | | |
| 52 | N, V, T, Q, Y, M, K, E, C, L, A, | | | |
| | R, H, P, W, E, D, S | | | |
| 53 | R, C, E, G, V, T, K, S, P, I, Y, | | | |
| | A, W, M, L, N, F, H | | | |
| 54 | A, F, G, L, E, Y, Q, C, K, T, V, | | X | |
| | R, I, H, N, M, S | | | |
| 55 | K, T, R, G, I, Q, Y, F, P, N, L, | | | |
| | D, A, S, M, W, C, V, E, H | | | |
| 56 | M, S, P, V, I, E, R, L, N, A, C, | | | |
| | G, K, D, H, T, F, W | | | |
| 57 | A, T, R, N, Y, L, D, E, F, H, K, | | X | |
| | M, P, W, V, S, C, I, G, Q | | | |
| 58 | M, W, R, P, N, K, L, D, I, E, Q, | | | |
| | S, F, A, G, C, Y, T, V, H | | | |
| 59 | S, W, E, P, G, Q, I , K, M, R, F, | | | |
| | H, L, N, D, C, T, A, Y | | | |
| 60 | M, P, S , R, K, Y, I, N, V, H, | | | |
| | W, G, F, L, Q | | | |
| 61 | A, R, Q, Y, M, K, S, G, H, N, V, | | X | |
| | L, F, C, D, P, E, W, T | | | |

TABLE 13OO
InsulinR_mb9
DPFTAMELVARVFELAVEKNDEELAKEAETLMEIVTKAAQNNDEEAVKEVIKRAKELLSKS
(SEQ ID NO: 793)

| | | | | |
|---|---|---|---|---|
| 1 | V, D, M, Y, P, F, Q, R, E, L, T | | | |
| 2 | P, G, I, A | X | | |
| 3 | F, W | X | | |
| 4 | A, S, N, Y, K, H, M, F, E, T, | | | |
| | V, R, W, C, Q, P, G, I, D, L | | | |
| 5 | A, M, T, L | | X | |
| 6 | L, M | X | | |
| 7 | Q, E, P, D, T, Y, A, N, S, G, | X | | |
| | V, K | | | |
| 8 | H, V, L, K, F, A, I, T, Q, G, | | | |
| | W, S, Y | | | |
| 9 | V, L, A, Y, I, F, M, W, S | | X | |
| 10 | A, F, W, S, G, L | X | | |
| 11 | R, E, D, W, T, V, Y, A, G, N, | | | |
| | L, K, C, F, H, M, I, Q, S | | | |
| 12 | C, V, Q, I, N, T, F, A, G, Y, | | X | |
| | S | | | |
| 13 | M, W, F, Y, C, D, N, T, A | X | | |
| 14 | E, D, T | X | | |
| 15 | L, C, G, I, K, V, S, R, W, D, | | | |
| | F, T, H, E, N, Q, M, Y, A | | | |
| 16 | H, A, F, E, L, C, I, Q, S, K, | | X | |
| | G, W, D, V, M, N | | | |
| 17 | F, M, L, W, V, Y, N, T, E, S, | X | | |
| | R, G, A, I, P | | | |
| 18 | E, V, Y, M, L, F, W, Q, S, P, | | | |
| | D, N, I, R, G, T, C | | | |
| 19 | K, R, P, Q, Y, L, E, V, A, W, | | | X |
| | G, D, S, F, N, M, I, T | | | |
| 20 | N, E, D, G, F, V, P, Y, A, M, | | | X |
| | R, L, S, H, T, I, K | | | |
| 21 | A, V, W, S, N, M, D, G, E, L, | | | X |
| | R, F, T, H, Y, I, K, Q, C | | | |
| 22 | E, Y, D, F, A, I, Q, G, S, W, | | | |
| | M, R, T, N, H, K, C | | | |
| 23 | E, W, T, G, S, Q, H, K, M, Y, | | | |
| | A, P, N, I, L, C, D, R, F, V | | | |
| 24 | A, V, W, Q, N, K, L, C, Y, I, | | | |
| | G, M, D, S, H, T, P, F | | | |
| 25 | L, V, T, S, M, A, G, D, I, E, | | | |
| | P, N, H, R, C, Q, Y, F | | | |
| 26 | A, V, R, P, M, H, K, L, D, E, | | | |
| | I, W, C, T, N, Y, S, G, F | | | |
| 27 | A, R, P, L, M, E, F, D, K, S, | | | |
| | G, N, W, Q, V, H, T | | | |
| 28 | L, A, V, C, D, N, P, I, G, W, | | X | |
| | M, T, R, K | | | |
| 29 | E, F, D, N, G, I, Y | X | | |
| 30 | A, I, H, K, L, N, Q, P, S, T, | | | |
| | W, D, R, F, C, G | | | |
| 31 | C, F, N, S, V, L, G, H, E, Y, | | X | |
| | Q, W, T, D, M | | | |
| 32 | M, W, F, L, I | X | | |
| 33 | A, N, S, T, E, W, L, C, M, H, | | | |
| | Y, V, Q, I, K | | | |
| 34 | N, T, R, S, P, Q, I, H, G, D, | | | |
| | E, M, V, L, W, Y, K, C | | | |
| 35 | V, T, L, F, M, I, C | | X | |
| 36 | T, A, G, I, V, W, S, N, M | X | | |
| 37 | K, E, I, T, Y, Q, C, R, L, D, | | | |
| | V, W, N, F, H, M, P, S, A | | | |
| 38 | C, I, L, A, N, T, V, S, K, H, | | X | |
| | G, R | | | |
| 39 | A, G, S | X | | |
| 40 | A, V, G, Q, E, D, W, I, Y, R, | X | | |
| | K, P, L, F, S, T, H | | | |
| 41 | N, C, E, I, W, M, T, R, S, K, | | | X |
| | V, A, F, H, Q, L, P, Y | | | |
| 42 | M, T, S, L, H, N, F, W, V, Y, | | | X |
| | G, C, Q, P, D, I, E, K | | | |
| 43 | A, S, P, N, V, M, L, H, G, K, | | | X |
| | D, C, F, T, I, Q, W | | | |
| 44 | A, R, S, N, M, K, L, F, G, C, | | | |
| | H, E, T, Q, P, W, I, D, V, Y | | | |
| 45 | A, V, W, T, R, Y, L, E, D, K, | | | |
| | G, H, I, F, N, P, C, Q, S | | | |
| 46 | C, W, S, Y, K, H, A, D, E, V, | | | |
| | M, G, I, Q, L, N, R, P, T, F | | | |
| 47 | C, I, V, L, A, P, N, W, M, T, Q | | | |
| 48 | K, W, G, H, Y, P, F, C, S, I, | | | |
| | M, R, A, D, E, Q, V, N | | | |
| 49 | L, V, R, Q, N, M, E, I, G, C, | | | |
| | E, D, T, P, W, H, A, Y | | | |
| 50 | I, L, V, A, T, S, M, P, G, N, | | X | |
| | Q, C, D | | | |
| 51 | M, P, I, H, D, E, R, W, Q, A, | | | |
| | L, Y, V | | | |
| 52 | A, C, L, N, T, V, K, G, I, P, | | | |
| | R, H, Q, M, S, W | | | |
| 53 | A, T, S, N, H, R, F, G, D, E, | | | |
| | Q, V, I, Y, M, L, W, P, K | | | |
| 54 | V, A, T, C, H, Y, S | | X | |
| 55 | M, W, R, L, Y, H, K, G, C, D, | | | |
| | N, E, I, F, Q, V, A, S | | | |
| 56 | L, V, W, R, S, N, M, E, H, C, | | | |
| | E, D, Y, K, T, A, G, Q, P, I | | | |
| 57 | A, K, N, D, L, T, C, S, V, Y, | | X | |
| | Q, H, R, W, M, P, I, F, G | | | |
| 58 | A, E, F, P, S, L, I, V, H, G, | | | |
| | K, R, Q, M, D, W | | | |
| 59 | S, V, Q, I, E, R, P, L, Y, A, | | | |
| | H, K, M, D, W, N, F, G, C | | | |
| 60 | K, T, D, H, Y, S, V, G, N, F, | | | |
| | L, I, R, A, P, C, M, E | | | |
| 61 | S, D, V, W, R, Q, Y, N, E, L, | | | |
| | E, M, T, H, I, P, G, A | | | |

TABLE 13PP
InsulinR_mb10
DDHAQAQLVKKLLKLWQDQGDDFYALLAVEAAANERVKKYLKKYYPEVYTLLEQVKRTLEKKRS
(SEQ ID NO: 794)

| | | | | | |
|---|---|---|---|---|---|
| 1 | D, T, I, E, H, P, M, Y, V, N, | | X | | |
| | A, L, Q, S, F, W | | | | |
| 2 | Q, Y, D, H, I, L, T, E, M, N, | | | | |
| | F, V, W, G, R, C, A, P | | | | |
| 3 | L, T, K, V, Q, D, N, I, Y, | S | | | |
| | F, M, H, A, W, E, R, P, | | | | |
| | C | | | | |
| 4 | I, E, H, T, F, N, D, M, A, | P, S | X | | |
| | V, Y, K, L, Q, G, W | | | | |
| 5 | E, S, D, A, N, T, Q, G | | X | | |
| 6 | F, T, Y, I, S, A, V, L, G, | M | | | |
| | W, C, P, R, D | | | | |
| 7 | E, D, N, F, G, K, Q, S, V, | A | | | |
| | W, H , R, T | | | | |
| 8 | E, Q, D, V, Y, L, T, S, F, M | | X | | |
| 9 | A, T, V, I, Y, Q | S | | X | |
| 10 | M, P, A, F, W, N, L, Y, K, | E, S, H | | | |
| | Q, D, G | | | | |
| 11 | E, D, S, G, M, K, N, T | Q, P, R, H, Y, A | | | |
| 12 | M, L, I, V | | X | | |
| 13 | F, L, V, I, Y, N, T | | | X | |
| 14 | W, N, V, D, K, S, G, R, L, | E | | | |
| | Y, C, T, A, Q | | | | |
| 15 | K, D, F, T, M, Y, W, N, E, | Q | | | |
| | L, I, A, H, G, S, P | | | | |
| 16 | F, S, A, W, Y | | | X | |
| 17 | K, V, T, E, A, Q, I, L, Y, | M, G, R | | | |
| | S, C, H, W, N, F | | | | |
| 18 | Y, F, S, W, A, K, T, V, E, | | | | |
| | D, R, Q, H, I | M, N | | | |
| 19 | S, F, L, G, M, A, N, I, Q, | D, R, Y, K, W, H | | | |
| | V | | | | |
| 20 | K, S, L, N, M, H, Y, F, G, | T | | | X |
| | Q, D, A, E, V, R, C | | | | |
| 21 | D, S | | X | | |
| 22 | S, Y, Q, F, I, P, N, H, G, | L, T, W, A, V, E | X | | |
| | M, D, R, K | | | | |
| 23 | F | | X | | |
| 24 | Y | | X | | |
| 25 | F, R, W, Y, H, L, K, M | I, Q, V, S, A, C | | | |
| 26 | G, Y, F, M, H, L, S | A | X | | |
| 27 | L, M, I | | | X | |
| 28 | G, A, S | | | X | |
| 29 | K, Q, F, Y, A, W, S, T, R, | | | | |
| | I, H, C, V, G, L, M, D, N | | | | |
| 30 | E, T, N, A | | X | | |
| 31 | A, S, G, M, T, C, P | | X | | |
| 32 | A, G, Y, W, C, T, M, V, Q | | | X | |
| 33 | Q, D, E, T, G, F, L, A, H, | P | | | |
| | W, M, V, R, I, S, N | | | | |
| 34 | V, D, Q, N, P, H, L, S, I, | E, G, Y | | | X |
| | T, M, R | | | | |
| 35 | T, V, M, R, K, F, A, Y, E, | D, L | | | |
| | H, S, N, W, P, G, I | | | | |
| 36 | G, H, Q, V, A, K | W, Y, D, S, P, I, T, R, N, E, L, | | | |
| | | M, F | | | |
| 37 | T, H, M, E, G, Q, S, L, F, N, | | | X | |
| | A, V, C, D, I, W, Y, R, P | | | | |
| 38 | C, F, R, M, K, S, N, Y, I, | L, E, P | | | |
| | G, W, D, Q | | | | |
| 39 | S, H, M, I, R | D, C, A, E, W, N, F, Y, K, L, V, T, | | | |
| | | Q | | | |
| 40 | F, L, N, S, C, A, R, W, E, H, | | | X | |
| | V, Y, M, G, K, D, I, T, Q | | | | |
| 41 | V, T, I, L, C, M, D | | | X | |
| 42 | M, F, Q, H, I, G, E, S, K, | D | | | |
| | Y, R, V, N, L, T, C | | | | |
| 43 | E, R, A, G, L, V, I, K, N, | W | | | |
| | H, T, F, D, Q, M, C | | | | |
| 44 | A, R, G, L, H, Y, T, W, V, F, | | | | |
| | K, I, C, S, E, M, N, Q, D | | | | |
| 45 | L, A, W, Q, F, N, S, Y, G, | M, K | | | X |
| | C, I, T, R, H, D, P | | | | |
| 46 | W, N, P, M, S, I, C, R, H, | D, Y, F | | | |
| | A, Q, G, K | | | | |
| 47 | T, R, D, N, H, Y, I, F, S, | Q | | | |
| | K, E, L, A, V, G, M, C | | | | |
| 48 | Q, E, N, Y, H, C, V, G, A, | I, L, K | | | |
| | W, P, S, T | | | | |
| 49 | D, N, M, Y, L, C, V, F, T, Q, | | | | |
| | S, R, E, I, P, A, W, K, H | | | | |
| 50 | R, W, I, Q, S, N, V, M, H, | F, A | | | |
| | T, K, E, C, D, L, G | | | | |
| 51 | G, A, Y, V, P, R, L, E, M, | C, I, D, S | | | |
| | T, H, Q, F, W | | | | |
| 52 | Y, S, W, F, E, L, A, M, Q, | V, T, C | | X | |
| | G | | | | |
| 53 | P, T, E, N, I, H, R, G, L, | D | | | |
| | Q, Y, W, C, M, E, V, S, | | | | |
| | A, K | | | | |
| 54 | E, I, H, V, G, T, R, M, P, | A, N, Y | | | |
| | K, Q, L, S, F, W, D | | | | |
| 55 | T, P, F, Q, M | Y, R, L, H, K, N, I, W, V, C | | X | |
| 56 | P, F, H, N | W, V, T, E, Y, R, C, S, K, I, L, | | | |
| | | Q, G, D | | | |
| 57 | A, M, Y, F, H, I, R, S, V, | P, K, W, G | | | |
| | L, D, C | | | | |
| 58 | P, M | N, K, V, R, G, F, T, H, D, S, Q, | | | |
| | | I, W | | | |
| 59 | H, R, S, W, V, T, N | P, Q, C, K, D, E, F, M, A, L, Y, I, | | | |
| | | G | | | |
| 60 | C, F, I, M, L, W, Y, N, V, | D, K, P, E | | | |
| | H, T, R, S, A, Q, G | | | | |
| 61 | Q, T, Y, N, E, W, P, V, K, | L | | | |
| | G, D, I, S, R, M, H, C | | | | |
| 62 | Q, P, W, T, R, K, F, G, V, | S, E, N | | | |
| | A, Y, M | | | | |
| 63 | S, K, E, M, W, F, Y, R, L, | H, T, A, N | | | |
| | V, D, Q, I | | | | |
| 64 | P, H, T, G, M, W, V, L, D, R, | | | | |
| | F, S, Y, I, A, N, Q | | | | |

TABLE 13QQ
PDGER_mb1
SEIEEVLELIRRYDPEVVKELEKVLRALKRSGVSPEKILKYLLIVAHFLGSPLAVRLLFRLMTKR
(SEQ ID NO: 1049)

| | | | | | |
|---|---|---|---|---|---|
| 1 | F, I, H, K, V, R, T, P, E, M, | | | | |
| | G, Y, L, W, N, Q, D, S, A, C | | | | |
| 2 | A, P, D, H, K, Q, S, G, R, Y, | | | | |
| | N, E, T, M | | | | |
| 3 | L, A, V, N, M, T, I, F | | | | |
| 4 | D, M, K, R, P, W, I, F, G, Q, | | | | |
| | H, S, A, Y, T, L, V, N, E | | | | |
| 5 | C, W, Y, V, A, I, K, H, L, D, | | | | |
| | P, G, F, N, M, T, Q, S, R, E | | | | |
| 6 | E, M, N, I, C, H, L, Y, Q, S, | | | X | |
| | T, G, W, V, A, R | | | | |
| 7 | F, M, I, L, K | | | | |
| 8 | C, Q, Y, T, I , A, S, H, K, W, | | | | |
| | M, D, G, F, V, N, L, R, E | | | | |
| 9 | G, T, R, M, D, H, V, Q, A, | C | | | |
| | I, W, E, N, F, S, Y, K, | | | | |
| | L | | | | |
| 10 | V, M, L, I | | | X | |
| 11 | Y, H, D, S, G, K, Q, E, A, | L, T | | | |
| | N, M, W, R | | | | |
| 12 | Q, W, D, H, S, G, I, L, P, K, | | | | |
| | F, M, Y, E, N, T, A, V, R, C | | | | |
| 13 | F, T, H, A, C, N, D, W, K, Q, | | | X | X |
| | R, V, S, E, G, M, Y, I, P | | | | |
| 14 | P, E | R, S, Q, N, D | | | X |
| 15 | H, R, F, E, D, Y, K, A, G, | L | | | |
| | Q, S, N, T, P, V | | | | |
| 16 | M, N, S, A, I, D, Y, H, K, P, | | | | |
| | L, Q, R, G, V, T, E, F, C | | | | |
| 17 | P, C, H, K, T, A, S, R, N, V, I | | | X | |
| 18 | H, S, C, T, W, Q, K, G, A, Y, | | | | |
| | M, E, N, E, V, I | | | | |
| 19 | V, E, R, H, Y, F, S, G, N, | | | | |
| | L, W, M, A, C, T, Q, I, D, P, K | | | | |
| 20 | L, K, D, V, I, P, T, M, E, | S, C, F, H | | | |
| | A, R, Y | | | | |
| 21 | F, L, M | | | X | |
| 22 | C, D, Y, K, M, I, S, W, Q, | | | | |
| | T, G, H, V, R, F, N, A, L, E | | | | |
| 23 | E, D, T, N, L, I, V, M, A, | H, R, F, Y, W, P, G, C, K | | | |
| | S, Q | | | | |
| 24 | P, A, V, H | | | | |
| 25 | V, R, K, E, D, S, Y | T, N, M, H, C, Q, A, W, F, G, I, L | | | |
| 26 | Y, N, E, D, M, H, W, Q, C, L, | | X | | |
| | T, G, F, S, I, K, A, V, R | | | | |
| 27 | L, I, T, V, R, A | S, Q, P | X | | |
| 28 | M, L, F | | X | | |
| 29 | N, Y, M, E, H, D, G, V, S, | C | | | |
| | Q, R, I, A, T, L, W, K, | | | | |
| | F | | | | |
| 30 | T, K, N, H, R, Q, G, S | A, L | X | | |
| 31 | H, K, Y, R, L, V, M, F, G | I, N, P, A, C, Q, T, S | X | | X |
| 32 | R, Q, K, L, N, F, H, S, M, T, | | | | X |
| | A, D, W, Y, E, G, I, C | | | | |
| 33 | M, A, W | T, F, L, N, S, K, I, C, R, G, E, Q, | | | X |
| | | V, H | | | |
| 34 | K, R | Y, N, C, I, F, L, P, W, T, E, D, V, | | | X |
| | | G, M, Q, A, H, S | | | |
| 35 | I, N, E, L, V, H, Y, Q, F, | C | | | |
| | M, G, S, A, R, D, K, T, | | | | |
| | P, W | | | | |
| 36 | P, L, Y, A, I, M, G, S, H, D, | | | | |
| | Q, V, T, R, N, F, E, C, K | | | | |
| 37 | K, R | | X | | |
| 38 | A, K, Y, C, S, T, M, G, V, | E, H, W | | | |
| | Q, R,I , N | | | | |
| 39 | V, T, I, C | N, E, K, Y, M, S, Q, G, A, D, H, L, | | | |
| | | R | | | |
| 40 | G, K, R, Y | | X | | |
| 41 | F, Y, T, E | | X | | |
| 42 | M, C, Q, L | | | | |
| 43 | F | I, Y, L, T | X | | |
| 44 | L, V, I, K | | X | | |
| 45 | I, V | | | | |
| 46 | S, A, M, F | | | X | |
| 47 | Y | H, R | X | | |
| 48 | Y | F, R, H, Q, K | X | | |
| 49 | K | H, N, C, I, Q, S, R, V, M, E, A, L | | X | X |
| 50 | R, K, G | | | | X |
| 51 | S | | | X | X |
| 52 | E, H, N, D, Y | Q, K, T, R, G, P, S | X | | |
| 53 | F, V, R, P, L, H | K, N, I, W, M, S, Y, Q, A, E, T, | | | |
| | | D, C | | | |
| 54 | S, A | | | X | |
| 55 | I | V | X | | |
| 56 | T, D, S, Q, N, H, E, K, | | X | | |
| | A, R, L, G | | | | |
| 57 | N, D, A, I, S, M, Q, T, V, | E, F, H, W, C, K | | X | |
| | Y, L | | | | |
| 58 | I, F, L, V, S, Q | | | X | |
| 59 | F, A | | X | | |
| 60 | F, I, T, M, K, H, A, E, W, Q, | | X | | |
| | S, N, D, L, G, R, Y | | | | |
| 61 | H, Q, Y, A, M, T, V, S, | | | | |
| | W, E, I, F, L, P | | | | |
| 62 | V, I, L, M | | X | | |
| 63 | F, V | Y, M, N, I, A, H, C, L, | | | |
| | | W, T, S | X | | |
| 64 | D, T, N, Q, F, I, G, V, M, R, | | | | |
| | H, A, L, Y, S, E, W, K | | | | |
| 65 | G, N, P, T, A, D, H, Y, I, F, | | | | |
| | L, E, Q, S, V, M, K, R, W | | | | |

TABLE 13RR
PDGER mb2
SLEELERLIRKLVKEGDPAARRALLVLESLKRRGVSPEEIVRRLIAFLFILGNPELIRLAIRLFL
(SEQ ID NO: 1050)

| | | | |
|---|---|---|---|
| 1 | I ,A, V, P, Q | N, T, K, S, G, H, R, M, W, C | |
| 2 | V, W, I, Y, T, Q | L, F, M, K, S, R, C, A | |
| 3 | T, S, K, Y, H, A, W, R, L, | I, D | |
| | M, V, Q, F, G, P, N, C, | | |
| | E | | |
| 4 | Q, A, R, K | I , G, T, S, E, V, M, L, Y, D, N, H | |
| 5 | I, L, A, M, R | T | X |
| 6 | E, N, T, G, Q, R | S, H, K | |
| 7 | A, Q, L, K, H | I, N, R, M, G, T, V, E, W, S, F | |
| 8 | Y | A, L, K, V, M, N, R, I, F, T, S, Q | |
| 9 | M | E, I, L, W, F | X |
| 10 | W, R, L, K, M, D | T, F, I | |
| 11 | R, K, E, S | N, Q, I, W | |
| 12 | F, M, T, V, A, W, Y, H, S, | L, C, I, E, G | |
| | N, K, Q | | |
| 13 | T, I, R, N | K, W, V, A, E, M, L, F, Y, G | |

| | | | | | |
|---|---|---|---|---|---|
| 14 | W | R, K, H, A, C, T, G, Y, Q, F, I | | | |
| 15 | T, S, Q, A, K, Y, L, D, M, | C, F, R, V, I, W, G | | | X |
| | N, E, H | | | | |
| 16 | D, R, H, G, K | Q, V, A | | | X |
| 17 | V, I | Q, D, E, N, W, S, C, A | | | X |
| 18 | T, P, Q, W | K, A, H, N, R, G, V, F | | | |
| 19 | Q, Y, G, R, K, S | E, L, A, M, H, N, F, P, V | | | |
| 20 | E, V, I, L, P, T, A | S, M, K, H, G, D, W, N | | X | |
| 21 | P, W | R, K, F, G, V, Y, Q | X | | |
| 22 | L, R | E, D | X | | |
| 23 | A, S, N | | | X | |
| 24 | W, Y, Q, F | L, C, T, M, A, E, V, H, R, S | | | |
| 25 | L, G, H, N | S | X | | |
| 26 | V, Q, P, K | W, I, N | X | | |
| 27 | C, W, Y, H, L, G | M, F, A, V, N | | | |
| 28 | Q, R, S, M, K, T, Y, V, L, | E, A, H, F, I | | | |
| | N, D | | | | |
| 29 | M, T | L, S, F, I, R | X | | |
| 30 | D, T, A, G, S, M, N | L, E, R, V, F | X | | |
| 31 | R, K, F | Q, T, H, W, N, L | | | |
| 32 | R, A, N | T, M, W, P | X | | |
| 33 | Y, W, R | C, M | X | | X |
| 34 | P, A | K, R, G, D, W, S, I, F | | | X |
| 35 | E, C, I, D, Q, T | L, N, M, V, K, A, G, S | | | X |
| 36 | M | A, L, S, T, E, D, H, K, V, I, R, | | | X |
| | | Y, Q, P, W | | | |
| 37 | R, Y, T, H, Q, K, W, A, N, | E, P, C, F | | | |
| | M, I, G, V, D, L | | | | |
| 38 | A, P, N, Q, D, S | E, T, K, H, L, I, M, W | | | |
| 39 | E, N, A, L | H | | | |
| 40 | G, E, K, R, H, Q, S, L, A, | M, V, C, T, I | | | |
| | Y, N, F | | | | |
| 41 | S, D, M, Q, E, L, N, F, T, | V, C, A, G, H, Y | | X | |
| | I | | | | |
| 42 | R, N | M, C, F, E, T | X | | |
| 43 | K, R | I, Y | X | | |
| 44 | V, L, T | A, E | | X | |
| 45 | C, T, F, S | I, V, A, M, G, L, P, D, | X | | |
| | | N | | | |
| 46 | S, I, T | A, H, Y, C | X | | |
| 47 | Y | F, Q, S, T, G | X | | |
| 48 | L, V, Y, C | I, Q, K | | X | |
| 49 | F | M, V, D | X | | |
| 50 | Q, G | I, T, M, F | X | | |
| 51 | I, V | L, W, Q | | X | |
| 52 | N, G, K, E | C, M | | | X |
| 53 | H, Q, K | N, W | | X | X |
| 54 | D, N, M, K, C | H, P, T, Q, S, E, R, G, A, V | | | |
| 55 | E, Q, I, V, D, T, M, R | A, S, G | | | |
| 56 | M, W, E, S, F | L, H, V, T, I, C, K, R | | X | |
| 57 | I, H | P, W, Y, T | X | | |
| 58 | N, H, K, R, T, P, Q | S | S | | |
| 59 | Q, P, C, S, G, A, T, Y, V, | D, M, L, R, I | | | |
| | H, E, N, F, K | | | | |
| 60 | S, A, I | W, G, Q | | X | |
| 61 | I, L, Q | C | X | | |
| 62 | K, R | H, Q, Y, | X | | |
| 63 | I, Q | L, T, A, S, R, G, N | | X | |
| 64 | T, Y, W, M | F, A, I, S, V | X | | |
| 65 | M, C, I, Y, L | F, A, S, T, V, W, E, K | X | | |

TABLE 13SS
PDGFR_mb3
DILEKAKKVAREILDPEVVRIFELAVEVIKKKGANPSSILIAVLRLLRRRGVDPELLREVERRAR
(SEQ ID NO: 1051)

| | | | | | |
|---|---|---|---|---|---|
| 1 | Q, K, L, W, I, N, S, V, H, | M, F, Y | | | |
| | A, R, D, G, P, E, T, C | | | | |
| 2 | M, I, L, V, F | Y, T, S, K, Q, R, A, C | | | |
| 3 | L, T, M, I, A | | | | |
| 4 | T, S, G, F, H, E, L, K, Y | Q, M, D, I, W, N, V, C, R, A | | | |
| 5 | E, N, R, I, K, Q, G, A | Y, V, M, T, S, C, W | | | |
| 6 | A, G | S | | X | |
| 7 | L, I, M, V, K, T | R, H, C, G, A, Q | | | |
| 8 | M, R, F, V, A, K, Y | H, I, Q, W, N, G, C, T, D, L, S, E | | | |
| 9 | A, T, C, V, G, Q, I, S, L | R, F, Y, M, N, H, W | | | |
| 10 | A, V, S, C, G | I, M | | X | |
| 11 | H, R, G | L, Y, E, A, I, C, S, Q | | | |
| 12 | N, T, H, S, Q, K, L, R, A, | I, V, D, C | | | |
| | E, M, G | | | | |
| 13 | V, T, I, M, L, R, K, Y | S, Q, C | | X | |
| 14 | F, L, M | | | X | X |
| 15 | A, S, R, V, P, G, Q, E, M, | F, Y, H, I, C | | | |
| | L, T, K, D, N | | | | X |
| 16 | F, S, R, P, N, G, V, Q, Y, | W, T, M, H, A, K, L, I, | | | |
| | D | E, C | | | |
| 17 | V, K, M, Q, P, T, Y, L, A, | I | | | |
| | R, N, G, F, D, E, S, W, | | | | |
| | H | | | | |
| 18 | S, E, H, C, F, K, A, Q, M, | W, I | | | |
| | G, D, P, N, R, Y, T, L, | | | | |
| | V | | | | |
| 19 | Y, R, N, H, G, C, Q, K, S, | E | | | |
| | T, M, A, V, I, D, W, L, | | | | |
| | E | | | | |
| 20 | H, F, W, R | V, Y, M, K, L, I, P, G | X | | |
| 21 | L, F, P, I | M, V | X | | |
| 22 | W, M, F | L | | X | |
| 23 | F, L, C, M, S, K, R, G, I, | Q, H, T, Y, V, D, P | | | |
| | E, W, N, A | | | | |
| 24 | W, K, R, L, H, G, V | F, M, T, S, N, I, Y, A | X | | |
| 25 | H, I, L, V, F, W, K, G, C, | Y, T, R, N | X | | |
| | A, M | | | | |
| 26 | A, S, C, V, T, M | I, L | | | |
| 27 | H, M, T, I, R, K, G, N, Q, | D, C | | | |
| | V, A, F, L, S, Y, W, E | | | | |
| 28 | G, A, K, F, S, H, W, Y, V, | R | X | | |
| | T, M | | | | |
| 29 | L, A | | X | | |
| 30 | R, K, L | Q, S, T, V, G, F | | | |
| 31 | N, R, K, Q | L, Y | X | | |
| 32 | R, K, M, H, N | I, F, T, V, L, S, W, Y, | X | | |
| | | G | | | |
| 33 | Q, A, R, K, F, V, M, I, S, | Y, P | | | X |
| | L, G, W, T, H | | | | |
| 34 | L, F, T, Y, H, M, W, V, I, | R, K, C, Q | X | | X |
| | A, G | | | | |
| 35 | K, S, R, T, Q, Y, N, H | P, A, G, M, W, I | X | | X |
| 36 | H, K, A, P, R, S, N | G, Q, T, D, M, E, Y | | | |
| 37 | V, M, G, I, Q, T, E, L, A, | H, Y, D | X | | |
| | K, R, F, W, N, S, P | | | | |
| 38 | G, A, S, P, T, H, R, Q, M, | V | X | | |
| | I, F, N | | | | |
| 39 | Q, A, I, V, C, G | K, S, N, T | | | |
| 40 | L, M, I, F | V, T | | | |
| 41 | I, V, L, N | | X | | |
| 42 | Y, I, W, F, T, V, M, A, Q, | P, G, L | X | | |
| | H | | | | |
| 43 | C, T, G, V, E | I, L, S | | X | |
| 44 | L | | | | |
| 45 | A, I, L, K, R, M, F, Y, W | V | X | | |
| 46 | M, I, F, L, D | W, V | X | | |
| 47 | I, C, L, A, V, M | R, K | | X | |
| 48 | Y, W, F, N, A, R, H | L, K, G | X | | |
| 49 | F, W, R | S, Y, T, A, M, H, K | X | | |
| 50 | E, D | H, R, K, Q, T, Y, M | X | | |
| 51 | L, N, G, C, A | H, R, S, K, Q | | | X |
| 52 | T, V, E, A, C, Q, S | I, F, L, G | | X | X |
| 53 | Q, H, R, P, S, M, K, D | L, Y, G, A, N, E, T, V | | | X |
| 54 | K, L, R, A, I, Y, V, Q, G, | E, H, C, D | | | |
| | T, M, S, P | | | | |
| 55 | Q, I, N, G, L, W, K, Y, M, | C, P | | | |
| | D, A, H, R, V, S, T, F, | | | | |
| | E | | | | |
| 56 | K, S, Q, R, A, V, L, P, H | N, I, C, T, M, E, D, Y, F | | | |
| 57 | L, I | | | X | |
| 58 | S, M, Y, F, Q, K, H, I, W, | L, C, N, G, V | | | |
| | R, T | | | | |
| 59 | M, Y, V, K, E, T, A, N, Q, | I, C, F, W | | | |
| | S, R, L, H, D | | | | |
| 60 | I, V | M, P, L, R, C | | X | |
| 61 | W, Y, F, H | I, L, C | X | | |
| 62 | M, A, T, W, Y, F, Q, H, E, | G | | | |
| | K, N, V, R, I, D, S, C, | | | | |
| | L | | | | |
| 63 | Q, R, M | S, K, G, A, I, V, T, Y, H | | | |
| 64 | A, S, W | T, G, C | | X | |
| 65 | Q, M, N, K, Y, W, R, A | H, V, I, F | X | | |

TABLE 13TT
PDGER_mb4
DEREELIELILRNLDDPEKVHELLKRLLELAEELGDRRLYRYVMLIFWALRRNPERAERLLRKLK
(SEQ ID NO: 1052)

| | | | | | |
|---|---|---|---|---|---|
| 1 | T, S, C, P, K, M, N, I, Q, L, G, | | | | |
| | F, V, A, W, R, H, Y, E, D | | | | |
| 2 | T, P, A, Q, D, H, V, S, R, C, G, | | | | |
| | M, F, N, W, L, Y, I, K, E | | | | |
| 3 | K, R | V, L, I, Y, D, Q, M, H, P, N, T, G | | | |
| 4 | N, S, D, P, G, K, C, Q, R, | M, I, F, Y, W, L, E | | | |
| | V, H, A, T | | | | |
| 5 | R, A, T, P, S, Y, G, L, K, | I, H, N, W, C, M, F, Q, D, E | | | |
| | V | | | | |
| 6 | V, T | C, Y, Q, W, F, I, D, M, A, E, S, | | X | |
| | | H, K, G, P, R, N, L | | | |
| 7 | K, S, Q, C, G, R | E, A, M, L, T, Y, N, P, V, H, D, | | | |
| | | F, I | | | |
| 8 | R, K, Q, F, V, M, A, N, T, | D, L, P, I, Y, C, G, E | | | |
| | H, W, S | | | | |
| 9 | K, M, H, R, G, Q, C, A, E, S, D, | | | | |
| | I, W, N, P, Y, T, V, L | | | | |
| 10 | V, K, G, Q, N, W, E, D, P, L, | | | X | |
| | H, I, Y, T, R | | | | |
| 11 | P, K, D, H, N, S, R, Q, A, | I, V, C, Y, W, F, L | | | |
| | G, T, M, E | | | | |
| 12 | K, G, I, T, F, D, E, A, C, M, | | | | |
| | P, V, Q, H, W, N, S, R | | | | |
| 13 | Y, E, D, C, K, W, S, F, Q, M, | | | | X |
| | T, H, P, V, A, R, N, I, L, G | | | | |
| 14 | Q, R, E, A, D, V, S, P, K, | M, N, L | | | X |
| | T, Y, I, H, G, C | | | | |
| 15 | F, A, V, S, G, L, C, R, E, | N, M, Y, W, K, I, P, H, T | | | X |
| | Q, D | | | | |
| 16 | V, Q, W, N, K, I, E, R, G, | D | | | X |
| | F, H, S, A, L, P, Y, C, | | | | |
| | M, T | | | | |
| 17 | A, T, L, G, N, R, S, P | C, K, Q, E, D, M, H, I, Y | | | |
| 18 | V, Q, A, S, T, K, I, F, R, L, | | | | |
| | Y, M, N, P, G, W, H, C, E | | | | |
| 19 | Q, M, C, E, A, S, R, H, G, N, | | | | |
| | I, P, T, K, D, V, Y, L | | | | |
| 20 | I, K, W, L, R, M, F, Y | E, Q, T, H, V | | | |
| 21 | I, V, P | K, N, Q, E, L, T, F, W, | X | | |
| | | Y, G, S, M, A, H | | | |
| 22 | T, A, H, K, N, S, I, Y, W | V, L, C, D, G, R, P, M, Q, F, E | | | |
| 23 | F, R, G, N | C, H, T, S, Y, M, I, D, A, K, W, E, | | X | |
| | | Q, V, P, L, | | | |
| 24 | F, G | I, M, L | | | |
| 25 | T, K, N | R | X | | |
| 26 | K, Y, D, V, N, Q, A, P, H, W, | | | | |
| | G, T, L, C, E, S, I, R, M | | | | |
| 27 | F, I, V, L, S | Y, C | | X | |
| 28 | V, L | | X | | |
| 29 | D, P, N, I, M, V, C, W, A | E | X | | |
| 30 | Y, K, N, T, E, A, C, D, Q, | I, F, H, L | | | |
| | S, R, W, G, V | | | | |
| 31 | V, S, T | G, C, A | | X | |
| 32 | D | N, E | X | | |
| 33 | D | C, H, N, I, M, T, S, A, | X | | |
| | | G, E | | | |
| 34 | F, Y, E, T, C, I, M, H, R, | S, W, L | | | |
| | N, Q, K, V, A, G | | | | |
| 35 | E, D, T, H, W, A, C | N, P, I, S, K, Q, V, L, | | | X |
| | | Y, F, M, G | | | |
| 36 | I, N, S, D | H, Q, E | | | X |
| 37 | T, K | G, M, Q, S, H, I, A, D, | X | | |
| | | V, P, R, L | | | |
| 38 | M, D, N, K, A, P, V, G, Y, | F, I, L, W, E | X | | |
| | Q, S, T, H, R | | | | |
| 39 | Q | N, R, M, I, C, G, L | | | |
| 40 | Y, L | | X | | |
| 41 | G | A, S, Q, R | X | | |
| 42 | H, Q, A, D, G, N, S , R | M, E, I , V, W, T, L, F, | | | |
| | | K, C, Y | | | |
| 43 | I, C | G, Y, L, T, V | | X | |
| 44 | M | | X | | |
| 45 | E, S, H, M, A, Y, G, N, Q, | T, L, F | X | | |
| 46 | Y, F | T, K, R, W, V, C, I | | X | |
| 47 | V, I | A, K, E, L, T, F | X | | |
| 48 | Y | F, H, W | X | | |
| 49 | N, W, C, F, M, Y, H, L, V, | T, S, I, E, Q, R, G | | | |
| | A | | | | |
| 50 | K, Q, E, R | F, G, M, I, D, T, S, Y, L | | X | |
| 51 | H, F, Q, S, K, V, M, Y, N, P, | | X | | |
| | I, L, R, G, T, A | | | | |
| 52 | K, N, T, F, Y, H, M, Q | A, L, S, W, E, V, G, D, I, | | | X |
| | | C, R | | | |
| 53 | E, K, M, H, Q, D, F, Y, A | R, T, G, I , S, L, V, W,N | | | X |
| 54 | F, M, N, V, K, W, A, I, T, Q, | | | | |
| | H, S, Y, R, P, G, D, E | | | | |
| 55 | K, P, V, N, Y, H, F, L, G, Q, | | | | |
| | D, I, W, C, S, A, M, T, E, R | | | | |
| 56 | L, M | K, W, G, Y, N, I, Q, V, | X | | |
| | | H, F, S, T, A, R | | | |
| 57 | T, Y, V, G, A | F, I, S, L | | | |
| 58 | N, Y, M, D, K, S, Q, T, R | F, W, I, A, H, L, C, P, V, G, | | | |
| | | E | | | |
| 59 | L, Q, V, T, I, N | M, A, K, S, P, F, C, H, W, | | | |
| | | E, D, Y, G, R | | | |
| 60 | M | A, F, Q, I, L | X | | |
| 61 | T, I, M, L, G | V, F | | X | |
| 62 | A | M, W, G, V, S, N, F, K, E, L, | | | |
| | | D, T, Q, H, I, Y, R | | | |
| 63 | N, G, H, A, M | L, W, F, I, S, Q, C, T, | X | | |
| | | Y, R, K | | | |
| 64 | F, W, M, L, I, Q | | | X | |
| 65 | P, G | R, C, T, A, F, H, D, M, V, Q, | | | |
| | | N, L, I, E, W, S, Y, K | | | |

TABLE 13UU
PDGFR_mb5
PELIEEALELLKEGDPKKVFRVLARLVQLLREKGDPRYRLVLLILAYVRFGNPEAARQLLRIVLK
(SEQ ID NO: 1053)

| | | | | | |
|---|---|---|---|---|---|
| 1 | V, C, G, Q, H, A, E, F, Y, K, L, | | | | |
| | I, R, W, M, P, T, S | | | | |
| 2 | H, K, I, D, P, G, N, W, V, Y, C, | | | | |
| | S, L, M, T, Q, A, F, R, E | | | | |
| 3 | T, S, H, E, Y, R, N, K, A, I, F, | | | | |
| | G, V, Q, W, M, L, P, C | | | | |
| 4 | A, V, N, F, P, Y, W, C, E, G, R, | | | | |
| | Q, T, L, S, K, M, I, D, H | | | | |
| 5 | M, R, N, L, H, K, Y, W, P, A, F, | | | | |
| | D, C, T, I, Q, V, G, S, E | | | | |
| 6 | K, H, F, D, N, I, S, C, A, G, V, | | | | |
| | W, Y, L, T, R, P, Q, M, E | | | | |
| 7 | Y, G, T, C, S, A, Q, H, D | | | X | |
| 8 | A, C, N, W, Y, D, S, K, M, R, H, | | | | |
| | E, I, V, Q, G, F, T, L | | | | |
| 9 | R, K, Q, W, T | S, L, Y, C, V, P, M, D, A, F, G, | | | |
| | | H, N, I, E | | | |
| 10 | Y, A, G | F, R, H, W, D, K, T, N, Q, I, V, | | X | |
| | | C, M, S, L | | | |
| 11 | A, Y, W, S, I, M, V, T, Q, F, | | | X | |
| | L, C, K, H | | | | |
| 12 | Y, A, Q, C, F, T, I, M, V, W, S, | | | | |
| | G, E, H, R, D, L, N, P, K | | | | |
| 13 | R, I, K, Y, Q, E, D, W, C, | G, H, E | | | |
| | T, P, V, N, L, S, M, A | | | | |
| 14 | N, E, Q, R, T, F, W, Y, H, K, S, | | | | X |
| | D, M, P, V, C, G, A, I | | | | |
| 15 | H, K, R, N, P, Q, L, C, V, F, A, | | | | X |
| | I, G, M, S, T, E, Y, D | | | | |
| 16 | K, T, N, V, H, I, S | Q, F, M, A, L, Y, R, E, C, G, W, | | | |
| | | D, P | | | |
| 17 | A, S , V, M, G, Q, H, T, P, R, | | X | | |
| | I, N, Y, K, L, D, E, F, W | | | | |
| 18 | G, P | D, N, S, H, L, E, M, Y, Q, R, V, | | | |
| | | A, K | | | |
| 19 | A | P, Y, K, T, C, M, S, F, W, G, I, | | X | |
| | | L, N, V | | | |
| 20 | C, H, K, R, I, G, T, S, P, M, W, | | X | | |
| | N, L, Y, Q, V, E, A, F | | | | |
| 21 | Y, M, E, Q, D, A, N, L, K, H, I, | | X | | |
| | F, V, S, T, G, P, R, W | | | | |
| 22 | P, Y, S, H, A, I, N, Q, M | L, C, R, K, G, T, V | | X | |
| 23 | T, I, V, M, A, G, C, L, S, F | | | X | |
| 24 | E, W, Y, N, T, V, M, Q, G, H, | | X | | |
| | L, K, R, S, A, I, P, F, C | | | | |

| | | | | | |
|---|---|---|---|---|---|
| 25 | P | K, L, D, E, H, A, M, N, | X | | |
| | | Q, Y, T, F, V, S, G, | | | |
| | | R | | | |
| 26 | Y, F, I, H, N, S, M, R, A, G, | | | X | |
| | Q, T, W, C, K, E, V, L | | | | |
| 27 | H, F | I, M, W, C, N, Q, A, T, | X | | |
| | | Y, L, R, V | | | |
| 28 | N, K | G, P, T, F, D, H, I, Y, | X | | |
| | | V, L, E, W, S, M, R, | | | |
| | | A, Q | | | |
| 29 | M, G, H, C, D, F, T, N, Q, P, | | | X | |
| | E, W, K, R, A, I, S, V, Y, L | | | | |
| 30 | Y | F, M, W, I, A, C, K, T, | | X | |
| | | Q, H, V, L | | | |
| 31 | E, D, H, S, N, Y, A, V, T, | C, I, F, G, L, K, M, P, | X | | |
| | Q | W, R | | | |
| 32 | T, D, S, K, W, C, R, F, M, | P, H, N, Q, A, E | X | | |
| | Y, L, V, G, I | | | | |
| 33 | S, F, N, C, L, M, E, W, V, T, Q, | | | | |
| | P, A, D, G, R, H, Y, K, I | | | | |
| 34 | C, V, L, Q, D, T, H, K, R, | | | | X |
| | P, M, S, Y, A, E, N, G, F | | | | |
| 35 | S, Y, E, N, H, D, Q | | | | X |
| 36 | K, L, T, V, Y, Q, D, G, I, R, | | | | |
| | N, H, M, A, E, W, S, P, F | | | | |
| 37 | K, E, S, L, M, T, A, Y, N, G, Q, | | | | |
| | H, R, V, I, F, D | | | | |
| 38 | L, I, V, E | C, M, F, D, A, H, T, Q, S, Y | | | |
| 39 | K, R, L | | X | | |
| 40 | H, V, W, T, Y, R, A, N, I | S, Q, F, K, P, D, E, M, G, L | | | |
| 41 | G, L, C, T, A, M, I, F, S, V, Y, | | | X | |
| | W | | | | |
| 42 | I | V, M, Y, F, P, L | X | | |
| 43 | R, Q, S, W, F, H, T, P, N, | | X | | |
| | Y, I, M, K, V, L | | | | |
| 44 | V, T, A, S, C | P, M, L, G, Y, I | | X | |
| 45 | A, G, V, I | S, T, F, W, P, Y, M, C, | X | | |
| | | L | | | |
| 46 | M, G, Y, A, S, F, W, E, V | | X | | |
| 47 | F, H, R, N, Q, Y, L, M | | X | | |
| 48 | I, T, Y, M, A, F, L, R, Q, | | | X | |
| | V, W, H | | | | |
| 49 | K | H, R | X | | |
| 50 | Y, I, S, K, L, H, Q, G, T, R, | | X | | |
| | V, M, N, W, A, F | | | | |
| 51 | H, Q, N, K, R, G, D, S, A, M | | | | X |
| 52 | P | Q, K, D, H, V, S, T, M, | X | | X |
| | | A, L, W, E, R, Y, N | | | |
| 53 | R, W, A, M, K, G, Y, N, E, Q, | | | | |
| | D, S, F, L, I, H, T, V, P | | | | |
| 54 | K, T, L, V, P, W, N, F, Y, S, G, | | | | |
| | M, I, H, D, R, A, Q, E, C | | | | |
| 55 | G, Y | M, V, I, H, K, R, Q, F, N, L, T, | | | |
| | | S, P, A | | | |
| 56 | Q, T, V, S, A | | | X | |
| 57 | F, I, H, V, N, E, L, Q, D, G, | | | | |
| | T, S, K, M, A, R, Y, C | | | | |
| 58 | N, M, T, V, R, E, G, L, K, S, H, | | X | | |
| | A, Y, D, Q, I, F | | | | |
| 59 | A, G, V, M, I, Q, L, F | | X | | |
| 60 | Q, G, T, R, A, I, S, M, E, L, E, | | | X | |
| | K, V, H | | | | |
| 61 | W, I, N, F, S, C, G, D, Y, A, E, | | | | |
| | P, M, L, Q, V, T, K, H, R | | | | |
| 62 | S, G, M, L, R, D, K, T, E, Y, N, | | X | | |
| | F, H, W, Q, V, A, I, P | | | | |
| 63 | L, M, P, F, I | R, E, H, D, T, N, W, S, G, C, Q, | | X | |
| | | K, A, Y, V | | | |
| 64 | K, Q, F, A, P, R, T, E, D, G, V, | | | | |
| | H, W, C, I, M, Y, S, N, L | | | | |
| 65 | F, Y, H, I, M, L, Q, P, V, N, E, | | | | |
| | D, G, S, T, A, R, K, W | | | | |

TABLE 13VV
PDGFR_mb6
DELREILREALEKGDPELVKELLELLARLADETGDPKLRIVIAYVWFAKKKNDPRLLKTALQVLK
(SEQ ID NO: 1054)

| | | | | | |
|---|---|---|---|---|---|
| 1 | K, R, V | H, A, Y, P, M, F, N, T, Q, E, W, | | | |
| | | S, I, G, L, D | | | |
| 2 | K, R, Q, H | N, Y, V, I, P, F, M, T, L, G, D, | | | |
| | | A, S, E, W | | | |
| 3 | I, V, H, P, M, T, G, F, W, D, | | | | |
| | N, Q, S, R, A, K, E, Y, L, C | | | | |
| 4 | A, K, S, N, I, P, Q, E, M | L, H, Y, F, T, G, W, V, R, D | | | |
| 5 | R, K, Q, H, N, T, S, V | I, A, M, C, W, D, L, F, G, Y, P, | | | |
| | | E | | | |
| 6 | K, R, H, L, M, Q, A, T | S, N, E, F, Y, C, W, D, P, V, I, | | | |
| | | G | | | |
| 7 | A, I, V, G, T, F, C, M, L, | S, W, Y | | X | |
| 8 | M, I, V, K | A, T, C, E, W, Q, F, H, N, G, S, | | | |
| | | Y, L, R | | | |
| 9 | R, K, S, A, M, V, H | Q, D, C, L, T, N, G, I, E, P | | | |
| 10 | K | G, R, M, Q, T, S, L, V, E, N, Y, C, | | X | |
| | | H, I, A, F, D, W | | | |
| 11 | I, Y, A | M, C, S, Q, V, N, H, W, T, G, F, L, | | | |
| | | D, E | | | |
| 12 | N, T, S, D, I, H, A, L, V, M, | | | | |
| | F, W, Q, Y, K, G, R, E, P | | | | |
| 13 | T, N, Q, S, R, A, K, H, V, G, | | | | |
| | I, L | | | | |
| 14 | K, N, E, S, H, W, D, P, R, F, | | | | |
| | Q, Y, T, G, A | | | | |
| 15 | K, E, I, M, W, L, S, Q, F, | H, A, Y, R, T, D, N, V, P | | | |
| 16 | W, L, M, I, V | N, K, H, G, Q, Y, E, S, R, A, F, | | | |
| | | T, D, P | | | |
| 17 | K, S, R, N , G, T , M, A, H, | Q, C, P, D, I, Y, V, W, F, E | | | |
| | L | | | | |
| 18 | H, N, K, Q, S, R, A | G, V, I, Y, C, F, M, P, D, E, T, | | | |
| | | L | | | |
| 19 | G, S, P, N, T, Y, M, W, A, | Q, H, I, E, R, V | | X | |
| | L, D, F, K, C | | | | |
| 20 | F, W, Y, M, I, P, V, G, N, | D, C, Q, H, R, K, E | X | | |
| | A, L, S, T | | | | |
| 21 | H, K, R, P, N, G, Q, Y | T, S, L, D, W, C, I, V, A, F, M, E | | | |
| 22 | A, P, C, G, S, Y, M, K, T, | E, R, V, I, W, F, D, L | | X | |
| | H, Q, N | | | | |
| 23 | W, M, F, I, L, Y | | | | |
| 24 | Y, F, I, K, M, L, V, Q, P, | C, D, E | X | | |
| | R, T, W, A, N, H, S, G | | | | |
| 25 | P, G, R, D, K, S, Q, N | A, M, H, E, T, C, I, Y, V, W, F, L | | | |
| 26 | V,T, S, C, M, I, A, L, F | | | X | |
| 27 | H | V, Y, R, K, I, P, A, L, | X | | |
| | | W, S, G | | | |
| 28 | E, A, P, V, Q, H, K, N, T, S, | | X | | |
| | R, D, L, M, C, G | | | | |
| 29 | E, M, T, N, A, H, Q, S, K, | | | | |
| | V, Y, W, C, I, F, R, L | | | | |
| 30 | H, Y, F, W, V | N, S, M, C, L, E, R, Q, I, A, T, G | | | |
| 31 | G, A | H, S, R, N, K, Y, E, Q, | X | | |
| | | W, P, D, V, F, T, M | | | |
| 32 | K, M, H, T, G, S, N, A, L, | Y | X | | |
| | I, Q, D, R, V, E | | | | |
| 33 | E, R, H, N, W, D, G, S, A, | | | | |
| | T, K, Q, Y, C, P | | | | |
| 34 | D, E | V, P, H, T, M, Q, S, A, K, R, Y, | | | X |
| | | N, G, F, W, L, I | | | |
| 35 | D, N, E | | | | X |
| 36 | D, R, K, P, Q, F | H | X | | |
| 37 | N, Q, R, H, V, T, Y, M, I, | | | | |
| | A, L, F, S, W, K | | | | |
| 38 | Y, M, I, W, F, L, V | | | X | |
| 39 | K, R, D | | | | |
| 40 | L | T, V, M, I | X | | |
| 41 | I, A, V, C, L | | | | |
| 42 | A, L, M, V, T, F, I | | X | | |
| 43 | L, I | K, T, Y, F, M, V, A, S | X | | |
| 44 | Y | | X | | |
| 45 | W, I, C, Y, M, V, L, T | | | X | |
| 46 | L, M | I, V, Y, W, F | X | | |
| 47 | Y, W, F, C | | X | | |
| 48 | W, G, S, A | | | X | |
| 49 | W | Y, R, Q, F, V, I, H, M, | X | | |
| | | L, S, K, N, C | | | |
| 50 | R, K, L, E | | | | |
| 51 | F | N, R, K | X | | X |
| 52 | S, Q, H, G, A, R, N, K | | | | X |
| 53 | D | | | | X |
| 54 | L, K, M, V, Y, W, F, I, R, P, | | | | |
| | A, S, T, N, Q | | | | |
| 55 | R | | X | | |
| 56 | L | | X | | |
| 57 | L, M, W | | | X | |
| 58 | H, A, R, K, Q, V, N, Y, W, M | | X | | |
| 59 | M, T, I, S, A | | X | | |
| 60 | A | | | X | |
| 61 | Y, F, W, M, L, I | | | | |
| 62 | D, S, L, G, I, N, M, T, E, | F | X | | |
| | H, V, W, A, R, Q, Y | | | | |
| 63 | L, I | M, F, Y, V, W | X | | |
| 64 | F, W, Y, M, L, I | | | X | |
| 65 | W, E, A, G, N, H, I, V, D, Y, | | | | |
| | F, R, L, T, C, S, Q, M, K | | | | |

TABLE 13WW
PDGER_mb7
DDERLATLAFRALIKRAGVKNLDVKVTNGKVRVTITGRDQASFKALQLVFALARRLGLQVQIDTR
Optimized SEQ ID NO: 1055

| | | | | | |
|---|---|---|---|---|---|
| 1 | V, A, L, R, H, T, I, N, Q, Y, M, | | | | |
| | S, W, F, P, G, E, K, D | | | | |
| 2 | T, Y, S, L, I , P, F, Q, K, H, | | X | | |
| | N, M, E, V, W, G, R, A, D | | | | |
| 3 | S, Y, F, V, H, D, I, N, Q, A, L, | | | | |
| | M, W, E, T, P, G | | | | |
| 4 | L, V, E, S, D, T, W, Y, A, M, H, | | X | | |
| | G, K, F, Q, R, N, P, I | | | | |
| 5 | H | Q, F, W, R, T, M, G, V, | X | | |
| | | L, N, I, K | | | |
| 6 | Y, W, Q, I, T, H, A, N, F, K, V, | | | X | |
| | S, R | | | | |
| 7 | T, Q, E | V, N, A, K, I, D, Y, W, F, R, H, | | | |
| | | S, G, L, M, C, P | | | |
| 8 | E, Y, H, I, K, S, Q, V, N, R, M, | | X | | |
| | A, L, D, T, F | | | | |
| 9 | A, L, M, V, P | | X | | |
| 10 | F, H | | | X | |
| 11 | E, P, M, Y, N, L, A, S, D, Q, V, | | | | |
| | F, T, G, H, W, K, R, I, C | | | | |
| 12 | A | S, I, Y, M, T, F, V, Q | X | | |
| 13 | L, M, I | | X | | |
| 14 | L, V, M, I | | X | | |
| 15 | Q, A, R, T, K, S, H, N, I, W, V, | | X | | |
| | M | | | | |
| 16 | V, K, R, T | Q, W | X | | |
| 17 | T, F, H, R, W, L, I, M, S, Y, | | | X | |
| | A, Q, V, K | | | | |
| 18 | G, K, N, R, W | | | | X |
| 19 | M, H, E, F, K, I, S, R, L, A, | | | X | X |
| | N, V, Y, Q, T | | | | |
| 20 | K, R | H, Q, T, N, V, I, E, D, G, M, L, | | | X |
| | | P, A, S | | | |
| 21 | W, F, M, Q, A, G, Y, E, H, L, | | | | X |
| | C, S, R, K, N, D, T, P | | | | |
| 22 | W | G, L, M, I, V, C, A, F | | X | |
| 23 | Y, T, I, E, L, H, N, G, A, K, | | | | |
| | Q, R, S, P, D, M, V, W, F | | | | |
| 24 | L, V, I, F, W | | | X | |
| 25 | F, E, D, I, H, S, A, Q, W, N, | | | | |
| | T, V, R, M, K, Y, L, C | | | | |
| 26 | I, V, L | | | X | |
| 27 | S, M, I, N, K, Y, R, A, F, Q, | | | | |
| | E, V, H, D, L, C, G, T, W | | | | |
| 28 | M, D, Q, R, T, A, H, S, G, K, | | | | X |
| | E, P, N, Y | | | | |
| 29 | H, Q, N, K, R, G, S, C | | | | X |
| 30 | T, N, A, S, Y, F, H, M, W, C, | | | | |
| | V, I, L, Q, R, K | | | | |
| 31 | V, A, C | | | X | |
| 32 | M, V, L, W, N, H, E, T, Q, A, | | | | |
| | K, Y, S, F, I, R | | | | |
| 33 | I, F, V, L, C, S | | | X | |
| 34 | Y, S, I, M, D, L, N, Q, W, H, | | | | |
| | G, P, V, A, F, R, K, T, E | | | | |
| 35 | G, F, V, S, M, C, Y, T, K, W, | | | X | |
| | D, E, H, N, Q, P, R, A, L, I | | | | |
| 36 | Q, S, N, C, I, A, M, H, K, G, | | | | X |
| | P, W, E, L, V, R, D, T, Y, F | | | | |
| 37 | K, T, A, E, C, H, N, S, Q, D, | | | | X |
| | P, R, G, Y, M | | | | |
| 38 | S, I, Q, M, N, V, F, P, A, Y, | | X | | X |
| | K, L, R, H, T, G, W, C | | | | |
| 39 | H, M, R, K, Q, S, G, F, W, N, | | | | X |
| | E, Y, C, T, D, L, A, V, I, P | | | | |
| 40 | D, G, I, T, C, F, Y, S, P, M, | | X | | |
| | V, H, W, N, A, L, Q, K, R, E | | | | |
| 41 | K, R, M, I, Y, N, G, F, T, H, | | | | |
| | W, S, C, Q, A, L, V, P | | | | |
| 42 | R, M, A, E, Y, F, H, C, N, Q, | | | | |
| | G, T, P, W, K, S, V, L | | | | |
| 43 | F, Y | W, H, P, T, E, I, G, M, | X | | |
| | | N, A, L, R, V, Q, D, | | | |
| | | K, S | | | |
| 44 | R, K, N, Y, H, M, T, Q, S | V, I, E, W, L, P, D, G, | X | | |
| | | A, E | | | |
| 45 | C, P, L, T, M, G, V, A, I, K, | | | X | |
| | Q, S, W | | | | |
| 46 | W, P, F, T, H, V, K, Q, S, M, | | X | | |
| | C, A, L, R, Y, I , G | | | | |
| 47 | R, P, K, Y, V, H, M, F, I, N, | | X | | |
| | W, T, A, S, L, Q, G | | | | |
| 48 | T, Y, K, M, R, L, Q, W | | X | | |
| 49 | L, I, V, F | M, C | | X | |
| 50 | K, Y, R, F, H, W | | X | | |
| 51 | I, H | A | X | | |
| 52 | L, F | | X | | |
| 53 | G, A | | | | |
| 54 | E, A, N, H, R, K, T, Y, F, S, D | | X | | |
| 55 | R | | X | | |
| 56 | F, M, L, E, P | | X | | |
| 57 | H, N, D, S, A, Q, R, E, K, G, | | | | X |
| | M, L, C | | | | |
| 58 | K, Y, R, M, F, L | | | X | X |
| 59 | T, E, A, K, N, M, L, P, H, V, | | | | |
| | D, I, F, S, W, R, Y, Q, G | | | | |
| 60 | T, I, C, M, L, A, P, V, F | | | X | |
| 61 | T, G, D, L, N, M, F, W, E, S, | | | | |
| | A, K, H, Y, I, R, V, Q | | | | |
| 62 | L, V, F, M, I, E | | | X | |
| 63 | W, T, N, E, I, S, K, L, Q, H, | | | | |
| | F, A, G, V, Y, C, D, R, M | | | | |
| 64 | K, R, S, N, A, C, H, L, P, W, | | | | |
| | Y, Q, M, I, G, V, T, F | | | | |
| 65 | C, N, L, W, V, M, S, G, Y, I, | | | | |
| | K, Q, T, A, H, F, P, R, E, D | | | | |

TABLE 13XX
PDGFR_mb8
SELAEEILELIEKGDPRVRKLILELLKELKERGDEKRFKLLVRVWFLLRSGNPELAKQLLKKIKK
(SEQ ID NO: 1057)

| | | | | | |
|---|---|---|---|---|---|
| 1 | F, V, N, H, G, W, T, K, Y, Q, | | | | |
| | R, L, S, I, M, A, E, P, C, D | | | | |
| 2 | S, H, D, Y, C, A, V, W, L, I, | | | | |
| | F, E, M, R, Q, K, N, P, T, G | | | | |
| 3 | C, A, Y, F, M, P, W, G, I, T, N, | | | | |
| | K, S, R, Q, L, V, H, D | | | | |
| 4 | M, P, S, F, I, L, E, V, T, Y, W, | | | X | |
| | N, C, H, G, A, K, Q, R, D | | | | |
| 5 | W, P, L, C, F, I, Y, V, M, G, | | | | |
| | N, D, K, S, R, A, E, H, Q, T | | | | |
| 6 | V, Y, G, C, R, P, A, N, D, K, | | | | |
| | S, M, Q, E, W, L, H, I, T, F | | | | |
| 7 | C, V, L, F, M, W, Y, I, A, E | | | X | |
| 8 | M, G, Q, V, H, A, F, Y, W, I, | | | | |
| | R, C, S, T, L, K, N, E | | | | |
| 9 | I, P, G, H, V, F, Y, A, T, Q, | | | | |
| | L, M, K, D, C, E, W, R, N, S | | | | |
| 10 | Y, W, G, K, Q, R, L, M, H, F, T | | | | |
| 11 | F, V, M, L, I, Y, W | | | X | |
| 12 | Y, H, I, C, G, D, A, N, V, T, | | | | |
| | R, L, Q, M, K, S, E | | | | |
| 13 | G, C, D, S, Y, A, H, M, N, Q, | | | | X |
| | T, V, K, L, R, I, F, E | | | | |
| 14 | H, N, D, Q, E, G, R, K, S | | | | X |
| 15 | Q, E, D, V, N, H, Y, A | | | | X |
| 16 | F, D, Y, W, S, N, H, T, M, V, | | | | |
| | E, R, A, L, K, I, G, P, Q, C | | | | |
| 17 | L, Q, C, H, K, I, T, G, D, Y, | | | | |
| | M, F, N, S, R, A, W, E, V | | | | |
| 18 | I, T, G, C, S, V, L, A, W, P, H | | | | |
| 19 | Q, V, M, L, K, I, R, T, N, S | | X | | |
| 20 | T, G, F, E, S, R, I, Y, N, L, | | X | | |
| | M, H, V, A, Q, D, K, P, W, C | | | | |
| 21 | C, N, R, T, Q, F, H, K, L, M, | | | | |
| | S, V, I, W, Y, A, D, G, E | | | | |
| 22 | M, V, I, L, T, F | | | | |
| 23 | Y, T, F, H, K, E, P, M, G, S, | | X | | |
| | Q, L, I, V, A, B, C, N | | | | |
| 24 | L, S, D, A, F, Y, C, V, T, I, | | | | |
| | K, Q, P, R, W, H, E, N, M, G | | | | |
| 25 | K, H, Y, V, M, Q, W, C, G, P, | | | X | |
| | F, S, E, D, I, A, T, L, N, R | | | | |
| 26 | V, S, C, A, T, I, L, M | | X | | |
| 27 | L | V, T, Q, A, H, R, K | X | | |
| 28 | W, V, D, F, R, L, T, Q, A, I, | | | | |
| | G, C, M, S, P, E, N, H, K, Y | | | | |
| 29 | H, A, S | M, Q, W, C, N, T, I, G, V, E, | | X | |
| | | L, F, K, R | | | |
| 30 | H, R, K, Q, Y, N | | | | |
| 31 | T, S, C, H, Y, Q, R, A, D, G, | | X | | |
| | F, I, K, M, V, W, L, E, N, P | | | | |
| 32 | L, S, T, V, M, N, A, K, Q, R, | | | | X |
| | I, H, G, Y, C, F | | | | |
| 33 | A, Y, N, H, S , R, G, Q, D, K, | | | | X |
| | P, F, M | | | | |
| 34 | R, E, F, N, M, A, S, H, Y, D, | | | | X |
| | Q, W, L, K, T, I, P, G | | | | |
| 35 | P, L, T, K, V, R, N, A, I, D, | | | | |
| | G, E, M, C, W, Q, S, Y, | | | | |
| | H, F | | | | |
| 36 | M, P, N, R, A, K, S, Q, V, H, | | | | |
| | T, F, Y, I | | | | |
| 37 | H, M, A, N, R, G, T, K, Q, W, | | | | |
| | Y, S, L, P, F, E | | | | |
| 38 | G, M, V, Y, W, S, F, R, I, A, T | | X | | |
| 39 | V, I, L, H, N, Q, M, R, T, W, | | X | | |
| | K, Y, A, F | | | | |
| 40 | E, Y, D, N, P, A, I, W, G, V, | | X | | |
| | H, K, S, T, C, L, Q, R, M, F | | | | |
| 41 | I, F, Y, M, L, W, C, V | | | X | |
| 42 | I, V, M, L, A, Q | | X | | |
| 43 | T, G, K, P, R, S | | X | | |
| 44 | T, L, I, V, P, C, G | | | X | |
| 45 | F, Y, W, P | | X | | |
| 46 | F | | X | | |
| 47 | W | G, F, M, Y, H, L, D | X | | |
| 48 | I, M, V, L, H, W | | | X | |
| 49 | I, R, A | | | | |
| 50 | I, V, L | M, T, C, A, S | X | | X |
| 51 | N, G, S, R, K, H, F | | | | X |
| 52 | H, R, L, K | Y, T, I, C, A, Q, W, S, | X | | X |
| | | N, M, F, V | | | |
| 53 | V, K, N, W, A, S, Q, T, G, R, | | | | |
| | P, D, M, H, L, E, I | | | | |
| 54 | N, C, R, D, G, F, I, H, V, M, | | | | |
| | Y, L, E, S, Q, P, W, A, T, K | | | | |
| 55 | I, V, L, H | | X | | |
| 56 | V, A, I, E, M | | | X | |
| 57 | R, M, K, A, I, V, S, T, Q, L, E | | | | |
| 58 | M, W, T, E, S, L, G, F, H, Y, | | X | | |
| | R, V, Q, N, I, K, A | | | | |
| 59 | Y | H, R, A, T, V, K, Q, | X | | |
| | | I, S, L | | | |
| 60 | I, V, L, M, A, W, T | | | X | |
| 61 | G, C, A, T, V, S, F, N, L, I, | | | | |
| | M, Y, Q, K, W, H, R, E, D, P | | | | |
| 62 | N, W, S, G, P, H, K, R, A, M, Q, | | X | | |
| | C, T, L, Y, F, I, V | | | | |
| 63 | Y, E, A, H, K, P, D, G, W, | T, Q | | X | |
| | M, C, L, R, I, V, F, N | | | | |
| 64 | S, A, T, N, Q, R, I, H, L, P, | | | | |
| | C, E, D, M, V, K, G, W, Y | | | | |
| 65 | Q, F, C, P, T, N, S, A, V, H, | | | | |
| | L, G, D, M, R, I, Y, K, E | | | | |

TABLE 13YY
PDGER_mb9
DKAREFLRAAAKYGDPSAKRALKLLEELRKRGIPPEEALKIVVEFLRKAGNPRLARVVEEALKDE
(SEQ ID NO: 1058)

| | | | | | |
|---|---|---|---|---|---|
| 1 | G, R, K, E, F, M, Y, W, H, S, C, | | | | |
| | A, V, L, Q, D, T, I, N, P | | | | |
| 2 | T, K, V, I, R, E, N, Q | A | X | | |
| 3 | A, I | G | | X | |
| 4 | F, R, M, H, Y, N, T, I, C, | E, Q, V, G, A | | | |
| | W, S, L, K, P | | | | |
| 5 | R, K, D, T, P, A, M, S | L, N, E, Q, H, I, V, W, | X | | |
| | | Y, G | | | |
| 6 | F | | X | | |
| 7 | L | V | | X | |
| 8 | K, R, M, H, S, C, L | T, Q, G, A, F | X | | |
| 9 | R, A, L, Y, M, F, E, T, V, | K | X | | |
| | S, P | | | | |
| 10 | A, C | T | X | | |
| 11 | A, R, G | S, T | | | |
| 12 | K, R, Q | G | | | |
| 13 | H, Y, R, K, L, F | W | X | | |
| 14 | K, R, G, H, Q, N, E, W, A, | M, L | | | X |
| | V | | | | |
| 15 | D | | X | | X |
| 16 | Y, G, H, I, T, R, W, F, V, | K, E | X | | |
| | S, P, M, N, A, L, Q | | | | |
| 17 | W, Y, F | H, S, G, M, D, C | | X | |
| 18 | A | S | | X | |
| 19 | R, K, I, N, E | | | | |
| 20 | I, M, W, F, V, L, R, Y, T, | N, Q, A | | | |
| | S, G, C, H, P | | | | |
| 21 | M, T | Y, L, Q, H, F, I, V, A, C, N, S, E | | X | |
| 22 | F, T, Y, N, I, S, L, C, V, | Q, K, G | | | |
| | W, M, R, H, A | | | | |
| 23 | W, Y, I, F, T, M, R, V, K, | A, N, S, C, Q | | | |
| | H, L | | | | |
| 24 | W | K, A, R, V, F, H, Q, L, G, Y, N, | | | |
| | | D, T, E, C, I, S | | | |
| 25 | D, N, L, F, V, I, T, M, Y, | C, E, S | | | |
| | A, Q, R | | | | |
| 26 | N, G, F, Q, Y, V, L, H, A, | C, P | | | |
| | T, M, S, E, I, W, D, R | | | | |
| 27 | I, V, L | A, M, T, G, H, N, Y, Q, F, E, S, | | | |
| | | P, R, D, W | | | |
| 28 | I, L, F | V, C, M, W, Y | | X | |
| 29 | R, V, E, I, K, C, M, D, H, | A, T, S, N, G, L, Y | | | |
| | Q | | | | |
| 30 | K, R, C | H, P, V, L, W, G, M | | | |
| 31 | H, R, M, A, L, F, S | V, I, W, C, P, N, T, G, Y | | | |
| 32 | R, G, K, Y, F, H, C, W, M, | D, E, P | | | X |
| | A, L, S, N, Q, T, V, I | | | | |
| 33 | Y, F, W, I, C, H, L, V, T | R, K, Q | | | X |
| 34 | R, N, L, H, P, S, D, F, E, | C | | | X |
| | K, Q, Y, W, A, M, I, T, | | | | |
| | G, V | | | | |
| 35 | Q, P, G, L, A, K, S, T, R | N, M, W, C, H | | | |
| 36 | M, Y, V, F, S, W, C, A, E, | H | | | |
| | K, Q, G, L, I, N, T, R, | | | | |
| | D, P | | | | |
| 37 | C, V, H, M, Y, Q, S, I, G, W, | | | | |
| | K, D, P, R, A, T, L, E, N, F | | | | |
| 38 | S, H, A, D, G, E, C, Q | T | | | |
| 39 | G, M, P, T, L, E, A, S, I, | N, F, H, Q | | X | |
| | D, V, C | | | | |
| 40 | I, S, D, K, E, N, Q, A, C, | G, W, F | | | |
| | M, L, H, Y, V, T, R | | | | |
| 41 | I, W, F | L, M, R, Y, V, K, E, C, G | | | |
| 42 | M, L, T, F, V, N, S, A, C, | E, Y, P | | X | |
| | D, G, I, H | | | | |
| 43 | I, P, V, L, M, E, H, A, G | C, F | | | |
| 44 | W, F, A, H, T, Q, V, L, I, | D, P, C | | | |
| | G, E, K, Y, M, N , R, S | | | | |
| 45 | I, R, V, K, W, E, C, L, N, D, | | | | |
| | T, F, M, S, Y, G, H, A, Q | | | | |
| 46 | E, N, T, Q, M, F, I, S | V, W, C, Y, H, A, G, L, D | | X | |
| 47 | K, A, R, G, S, L, P, H | I, T, W, C, N | | | |
| 48 | I, F, T, S, Q, P, Y | C, R, W, N, M, G, K, H, V, A, | | | |
| | | L, E, D | | | |
| 49 | T, F, W, I | C, P, V, H, L, R, M, Y, N, S, A, | | X | X |
| | | G, K, D, Q, E | | | |
| 50 | I, W, V | L, M, E, F, T, C, Y, D, | X | | X |
| | | S, G, R, H, A, P, K | | | |
| 51 | I, W, F, G, Y, N, P, D | H, Q, M, A, T | | | X |
| 52 | P, K | R, C, S, E, F, D | | | |
| 53 | R | K | X | | |
| 54 | M, I, L, Q, V, N, P | | X | | |
| 55 | F, A, G, S, Y, H, W, V, T, | N, I, K | | | |
| | E | | | | |
| 56 | R | N, K, G, D, C, M, A | X | | |
| 57 | V, L | C, I | X | | |
| 58 | A, T, V, L, S, F, I, N | Y, C, E | | X | |
| 59 | D, G, S, E, N, C, F, Y | H, T, A, M, Q, L, R, W, K | | | |
| 60 | E | D | X | | |
| 61 | F, M, I | V, A, L, W, R | | X | |
| 62 | W, S, G, A | H, M, T, C, F, R, L, I, V, Q, Y, | | X | |
| | | N, K | | | |
| 63 | D, T | E, G, L, C, F, M, S, W, H, Q, P, | | | |
| | | R, V, A, K, Y, N, I | | | |
| 64 | N, D, Y, G, V, E | S, H, P, T | X | | |
| 65 | S, N, H, K, Q, E, R, P, V, | W | | | |
| | G, I, T, L, A, F, D, M, | | | | |

Y, C

TABLE 13ZZ
PDGFR_mb10
SLIEEILKEVRKKNPRVVYILERLLRRLKEDGVPPEKILRILIAAAKRLGDPEASELLRRALKRK
(SEQ ID NO: 1059)

| | | | | | |
|---|---|---|---|---|---|
| 1 | H, P, R, M, I, L, A, K, C, | W | | | |
| | V, F, E, D, G, Y, N, Q, | | | | |
| | T, S | | | | |
| 2 | R, Q, K, E, S, Y, T, A | N, C, D, H, W, M, G, I, P, V, E, | | | |
| | | L | | | |
| 3 | P, I, N, H, Q, T, V, S, F, K, | | | | |
| | D, M, G, E, W, A, C, R, Y, I | | | | |
| 4 | H, N, Y, T, G, F, W | M, R, S, V, A, Q, P, I, D, L, C, | | | |
| | | K, E | | | |
| 5 | N, R, A, Q, F, M, H, K, S | I, T, P, L, V, D, W, C, G, E | | | |
| 6 | Q, W, F, Y, M, R, K, V, G, | E, N, D, T | | X | |
| | P, C, S, H, A, I, L | | | | |
| 7 | N, F, D, P, G, I, H | A, T, K, M, S, Q, W, L | | | |
| 8 | R, M, W, E, H, N, A, G, T, | | | | |
| | S, V, F, I, D, Y, P, Q, L, C, K | | | | |
| 9 | Y, H, R, K, N, Q, A, T, D, | C, I, W, M, E | | | |
| | F, G, P, S, V, L | | | | |
| 10 | Y, F, L, D, K, W, C, M, N, | H, G, I, E, P, R | | X | |
| | Q, S, T, A, V | | | | |
| 11 | Q, F, G, D, A, H, E, N, M, | | | | |
| | P, K, T, W, L, I, S, Y, V, C, R | | | | |
| 12 | C | A, R, H, Q, T, I, G, V, N, S, D, | | | |
| | | Y, E, P, M, L, F, K | | | |
| 13 | H, C, R, W, V, I, S, E, M, | | | | X |
| | T, Q, Y, P, L, F, A, G, N, K | | | | |
| 14 | E, Y, V, Q, I, G, S, A, R, | D, H, M, T, P, C | | | X |
| | K, N | | | | |
| 15 | M, C, K, H, L, R | W, D, Q, F, S, T, V, E, | X | | |
| | | G, A, N, Y, I, P | | | |
| 16 | A, T, L, M, Y, W, K, C, H, D, E, | | X | | |
| | V, P, Q, I, N, G, S, F, R | | | | |
| 17 | H, A, Y, T, F, I, N | L, W, K, S, R, Q, D, M, G, V | | X | |
| 18 | R, M, Y, W | F, H, G, K, A, S, C, D, P, T, Q, | | | |
| | | E, N, I, L, V | | | |
| 19 | L, R, G, S, I, M, Q, N, A, | E, C, T, K, W, D, H, Y | X | | |
| | V, F, P | | | | |
| 20 | P, A, T, S | Y, V, F, M, Q, L, W, R, | X | | |
| | | G, H, I | | | |
| 21 | I | M, Y, V, L | | X | |
| 22 | N, Q, H, L, R, V, M, A, K, | W, T, I, C, P, D, F, G, E | | | |
| | S, Y | | | | |
| 23 | D, H, Q, K | A, M, T, I, V, N, G, L, | X | | |
| | | S, F, Y, E, P, R | | | |
| 24 | I, F, M, V, L | | X | | |
| 25 | I, V, H, W, F, T, M, N, Q, | | | | |
| | C, K, R, Y, S, L | | | | |
| 26 | M, L, C, Q, I, A, G, K, S, | | | | |
| | W, H, F, V, P, N, Y, T, R | | | | |
| 27 | K, Q, W, D, E, R, N | | X | | |
| 28 | M, C, V, I, T, L | | X | | |
| 29 | P ,R, K | F, D, S, Y, V, N, C, E, A, T, I, | | | |
| | | G, L, W, M, H, Q | | | |
| 30 | V, I, M, L, A | N, T, F, Q, S, R, H, G, W, C, K, | | | |
| | | D, Y, E | | | |
| 31 | F, T, W, Q, H, I, E, N, S, G, | | X | | |
| | D, A, L, Y | | | | |
| 32 | K, E, A, D, L, H, I, C, R | T, V, N, Y, F, S, M, W, G | | | X |
| 33 | H, L, I, W, F, C, Q | Y, D, S, T, E, A, M, N, V | | | X |
| 34 | A, Q, M, F, K, D, G, L, S, | | | | X |
| | T, V, H, E, R, N, Y, I, P, C | | | | |
| 35 | W, H, P | I, Q, L, C, A, Y, F, V, | | | |
| | | M, E, G, N, S, D, R, K, T | | | |
| 36 | M, F, T, N, W, H, L, I, C, | | | | |
| | A, Q, V, G, S, Y, D, P, E, K | | | | |
| 37 | N, M, T, Y | D, R, L, I, H, Q, V, F, | X | | |
| | | E, A, G, S, W, K | | | |
| 38 | Q, H, W, Y, N, R, F, T, M | A, V, L, E, G, K, C, S, I | | | |
| 39 | P, A, V, R | Q, K, T, H, E, G, I, C, | | X | |
| | | D, M, W, N, Y, F, S, L | | | |
| 40 | Q, L, H, P, A, N, M, F, I, | G, Y, W, D, T | X | | |
| | V, S, E, K, R | | | | |
| 41 | M, G, V, F, Y, A, I, L | | X | | |
| 42 | M | C, S, V, Y, F, L | | X | |
| 43 | G, R, S, A, K, V, Y | P, L, W, E, H, F, M, C, | X | | |
| | | N, T, I | | | |
| 44 | G, M | Q, L, I, F, V, S, W, H, | X | | |
| | | Y, A | | | |
| 45 | A, G | | X | | |
| 46 | I, Y, T, N, C, W, S, Q, V, | | | X | |
| | G, D, E, A, M, H | | | | |
| 47 | D, E, Q, M, N, L, G, V, I, | | X | | |
| | A, S, H, T, R, Y, K, W | | | | |
| 48 | K, F | Y, W, H, R | X | | |
| 49 | I, M, F, V, L | | X | | |
| 50 | A, T, Q, N, L, G | I, H, W, R, E, K, S, F, | | | X |
| | | D, M, Y, C | | | |
| 51 | H, Y, I, A, T, W, V, S, Q, | G, C, E, D | | X | X |
| | F, N, L, M | | | | |
| 52 | W, Y, V, M | H, T, A, L, E, D, N, Q, | | | |
| | | S, G, C, R, P | | | |
| 53 | K, N, V, L, R, I, S, M, G, | T, D, C, E | | | |
| | W, Q, A, F, Y, H | | | | |
| 54 | Y, L, S, A, Q | E, G, H, V, F, W, C | | X | |
| 55 | Y, M, G, F, L, R, V, T, W, | Q, H, P, D, I, N, A, C | | | |
| | S, K | | | | |
| 56 | N, S, R, F, W, I, Q, M, K | A, V, C, H, D, Y, T, E | | | |
| 57 | P, H, S, W, T, Y, E, F, N, | M, K, R, D, A, Q, I, C, | | | |
| | V, G | L | | | |
| 58 | G, I, F, P, A, D, Q, C, M, | W | | | X |
| | L | | | | |
| 59 | N, A, S, H, M, Y, T, G, D, | I, V, C, R | | X | |
| | Q, E, W, K, L | | | | |
| 60 | E, M, G, L, F, I | K, T, S, N, D, H, P, Y, V, A, Q, W, | | | |
| | | C, R | | | |
| 61 | N, Q, S, I, L, F, P, M, Y, | T, R, E, W | | | X |
| | V, K, G, C, A | | | | |
| 62 | I, F, G, K, V, D, E, W, T, | Y, S, H, P, N, Q, C, A | | | |
| | M, R, L | | | | |
| 63 | M, V, A, Q, G, Y, L, S, I, | F, H, R, D, W, C, P, K | | | |
| | E, T | | | | |
| 64 | P, Y, L, Q, W, N, V, T, I, S, | | | | |
| | G, F, C, K, E, M, D, A, H, R | | | | |
| 65 | F, D, T, C, M, I, H, R, W, | Y, G, N, K | | | X |
| | L, S, V, A, Q, E, P | | | | |

TABLE 13AAA
TGFb_mb1
HCTIEVVGVDPEKVEAIAAAYGAEVCEKDGKFEIHLDDPHSAESAAVAISVLTNRPVRLQC
(SEQ ID NO: 1347)

| 1 | C, L, R, D, K, H, Y, Q, W, | T, P, E, S | | | |
|---|---|---|---|---|---|
| | I, F | | | | |
| 2 | C, E, V, D, L, R | A, Y | | X | |
| 3 | I, E, G, N, V, F, Q, C, P, | T, D, S, Y | | | |
| | K, H | | | | |
| 4 | T, I, P | G, S, M | | X | |
| 5 | F, G, N, S, Q, P | E, T, L, M, C | | | |
| 6 | C, F, T | N, A, S, V, E, K, R | | X | |
| 7 | P ,K, G | N, C, V, D, L, A, E, S, W, Q, M, Y | | | |
| 8 | N, V | G, C, E, L, I, W | | | X |
| 9 | E, V, K | S, F, A, Y, L, R | | X | X |
| 10 | E, K | D, Y, A, W, C, S, G, Q, | X | | X |
| | | P | | | |
| 11 | E, S, F | P, G, R, H, V, K, I | | | |
| 12 | F, D, H, E, V, R, N, L, Q | W, P, T | X | | |
| 13 | I, K, L, R | T, H, A, S, D, E, N, F | | X | |
| 14 | I, L, V, Y | A, Q, M, K, P, G, F, R | | X | |
| 15 | G, F, C | Q, E, N, D, R, W | X | | |
| 16 | V, I | A, W, C, Q, K, H, M, G, | X | | |
| | | L | | | |
| 17 | E, T | I, P, R, Q, L, K, N, C, | X | | |
| | | Y | | | |
| 18 | C, I, K | A, Q, G, T, M, V | | | |
| 19 | Q, F, A, E, C | N, S, D, T, V, L | | | |
| 20 | T, N, C | A, M, W, E, S, H, I, V, | X | | |
| | | G | | | |
| 21 | Q | S, V, F, P, C, R, L, N, Y, K | | X | |
| 22 | E, G, V, K, F | Y, A, S, L, T, C, N | | | X |
| 23 | G, T, A, P, K, R | S, I, H, L, E, F, C, N | | X | X |
| 24 | W | E, G, P, I, K, H, L, A, V | | | |
| 25 | D, N, S, V, K, Q | E, T, R, H, F, A, I, P, M, G | | X | |
| 26 | D, L, H, Q, F, R, Y, K, V | I, P, N, C, G, S, E, T, W | | | |
| 27 | R, E, D, L | S, H, I, V, A, P, G, Q | | | |
| 28 | K, S, G, Q, N, F | D, H, P, C, E, I, Y, T, R | | | |
| 29 | G, T, D, P, V, R | H, S, N, Y, E, A, I | | | X |
| 30 | F, A, G, W, L | M, D, S, Q, C, N, K, V, I | | | X |
| 31 | K, A, G, I, P, F, V, N, R | Y, M, S, L, H, T | | | |
| 32 | F | T, L, I, V, S, K, Y, C, R, N, Q, D, | | X | |
| | | H | | | |
| 33 | A, S, F, K, Y, T, V | E, C, M, I, Q | | | |
| 34 | I, R, F, M, L, T | Y, Q, H, W, G, N, D, P | | X | |
| 35 | G, R, T, V | H, K, D, L, C, S, N, M, A, I | | | |
| 36 | L, C, I, R | G, A, Q, D, P, Y, N, M | | X | |
| 37 | D, K, G, E | R, H, S, Q, Y | | | X |
| 38 | D, G | Q, C, I, N, E | | | X |
| 39 | Y, F, P | D, N, T, V, A, L, S | | | |
| 40 | W, V | H, E, N, L, Y, K, G, Q, | X | | |
| | | D, P | | | |
| 41 | Y, K, M, V, N | S, T, G, A, D, Q, C | | | |
| 42 | P, G, A, F | L, N, V, I, M, E, K, Y, C | | | |
| 43 | Y, F | L, V, E, H, D, S, G, K, | X | | |
| | | Q, A, I, P, N | | | |
| 44 | K, G, S | I, W, E, P, M, Q, N | X | | |
| 45 | A, N, E, M | R, W, T, P, S | | X | |
| 46 | Y, A, T, L, M | P, W, E, G, I, S, V, C, K, Q, D, N | | | |
| 47 | A, C, R, T, N | I, W, G, P, M, V | X | | |
| 48 | A, G | S, P, T, I, N, E | X | | |
| 49 | I, N | F, Q, D, A, R, C | | X | |
| 50 | H, S, G, E, Y | V, R, I, N, D, T, C, K, F | | | |
| 51 | M, S, F, V, A, I | L, D, P, W | X | | |
| 52 | L, G, E, F | I, Y, S, C, A | X | | |
| 53 | C, G, M, T | A, L, P, D, S, H, E, I, R, K | | X | |
| 54 | N, T | G, P, Y, K, I , F, V, C, | X | | |
| | | L | | | |
| 55 | R, K | Q, V, N, C, H, F, E, G, Y, A, P | | X | X |
| 56 | D | P, R, G, N, I, S, C, L, W, M, F, Y | | | X |
| 57 | P, C, S | G, V, D, T, E, I, W | | X | |
| 58 | D, G, P, H, R, N | S, E, W, Q, A, Y, T, L, V, M | | | |
| 59 | E, S, A, D | Q, H, E, T, R, L, K, M, I, G, W | | | |
| 60 | T, M, Q, R, H | P, W, G, Y, F, D, K, C, A, V, L, I | | | |
| 61 | E, C, G, F | M, W, N, A, Q, P | | | |

TABLE 13BBB
Tie2_mb1
PEEFVREALRRLIPDPRLQKIVEEALELAKRLGIDPFEVLQILDFLLIYLGDPEEAAKILEELVR
(SEQ ID NO: 1449)

| | | | | | |
|---|---|---|---|---|---|
| 1 | W, M, I, P, D, Y, K, H, V, | R, T | X | | |
| | L, N, Q, A, E, G, F, S, | | | | |
| | C | | | | |
| 2 | W, Y, C, I, L, H, V, E, F, | N, T, P, Q | | | |
| | M, A, S, D | | | | |
| 3 | M, L, W, I, A, V, C, F, E, | G, R, K | | | |
| | Q, P, D, H, N, T, Y, S | | | | |
| 4 | Y, F, C | | X | | |
| 5 | V, C, T, I | | X | | |
| 6 | C, R, M, N | T, K, H, Y, Q, A, L, V | | | |
| 7 | C, L, F, M, W, A, E, Q, V, | H, Y, S, D, T | | | |
| | I | | | | |
| 8 | V, C, I, W, Y, A, M, T, L | S, Q | X | | |
| 9 | C, L, M | A, F | | X | |
| 10 | S, C, R, Y, W, F, L, N, M, | H, D | | | |
| | G, Q, K, T, A | | | | |
| 11 | C, W, M, F, I, L, V, R, Y, | Q | X | | |
| | H, S, A, T, N, K | | | | |
| 12 | C, F, L, I, W, Y | Q, M | | X | |
| 13 | H, Y, F, W, A, C, N, S, T, | | | X | X |
| | G, R, Q, D, E, M, I, L, K, P, V | | | | |
| 14 | C, N, H, K, S, F, D, T, Q, R, | | | | X |
| | Y, M, I, A, L, W, G, P, E, V | | | | |
| 15 | H, T, W, N, S, G, I, Q, C, A, | | | | X |
| | P, V, L, K, Y, M, F, R, D, E | | | | |
| 16 | G, D, A, P, R, F, K, W, M, | L | | | |
| | N, T, I, S, E, H, C, Y, | | | | |
| | V, Q | | | | |
| 17 | H, R, M, P, S, Q, C, G, K, N, | | | | |
| | V, T, F, D, E, L, A, Y, W, I | | | | |
| 18 | H, F, W, G, Y, L, N, C, R, S, | | | | |
| | M, D, A, Q | | | | |
| 19 | W, E, G, K, T, E, D, A, Q, | I | | | |
| | M, N, L, Y, S, H, C | | | | |
| 20 | P, Y, C, Q, W, K, H, R, D, L, | | | | |
| | N, T, I, S, G, E, F, A, M, V | | | | |
| 21 | P, A, I, V, G, S, T, C | | | | |
| 22 | S, W, A, G, I, P, F, M, V, | Y | | X | |
| | T, L, C | | | | |
| 23 | D, E, N, Q, H, C, K, G, S, | T, A, V, I | | | |
| | R | | | | |
| 24 | M, E, P, Q, K, A, S, D, T, | G | | | |
| | H | | | | |
| 25 | M, A, Y, C, L | V | | X | |
| 26 | W, L, Q, C, V, I, M, Y, F | T | | | |
| 27 | C, S, R, D, Q, L, E, F, A, V, | | | | |
| | I, G, K, M, N, Y, T, W, H | | | | |
| 28 | L, Y, F, V, M, C | | | | |
| 29 | G, A, S | | | X | |
| 30 | F, N, Y, K, H, D, R, S, A, | M, I, L, W, V | | | |
| | C, Q, G, E, T | | | | |
| 31 | R, M, I, L, F, N, V, K, D, C, | | | | |
| | H, S, Q, A, T, G, P, Y, W | | | | |
| 32 | L, E, Y, D, M, W, C, T, H, F | | | | X |
| 33 | V, D, A, K, H, G, Q, E, S, L, | | | | X |
| | C, N, R, I, M, T, Y, F | | | | |
| 34 | Y, I, E, V, H, F, T | N, A, Q | | | X |
| 35 | C, D, E, H | | X | | X |
| 36 | L, C, W, P, M, Q, Y, T, A, | G, H, E, V, I | | | |
| | D, S | | | | |
| 37 | Y, C, F, G, V, M, N, L, W, A, | | X | | |
| | D, Q, T, H, I | | | | |
| 38 | E, D, N, Y | C | X | | |
| 39 | A, V, G, L, F, T, S, C, Y | | | X | |
| 40 | F, W, Y, L, C, V, M | | X | | |
| 41 | E, T, Q, H, N, Y, D, W | S, C | X | | |
| 42 | I, W, F, V, Y | | | | |
| 43 | I, V, T, C, A, L, M, S, F | | | X | |
| 44 | D, R | | X | | |
| 45 | L, M, I, V, F, W, T, C | E | X | | |
| 46 | F, L, M | | | X | |
| 47 | C, V, F, M, W, L, I, Y, T | N | | | |
| 48 | C, I, F | M | X | | |
| 49 | C, S, L, W, V, Y, F, I, A, M, G | | X | | |
| 50 | W, V, F, I, T, M, R, K, S, A, C, | | | | |
| | L, Y, Q, G, N | | | | |
| 51 | P, C, H, T, S, K, G, Q, N, | E | | | X |
| | A | | | | |
| 52 | C, K, E, D, G, T, S, P | V, A, R, Q | | | X |
| 53 | G, S, T, N, C, R, Y, Q, K, F, P, | | | | |
| | W, H, A, E, D, M, V | | | | |
| 54 | C, I, K, M, H, T, R, Y, Q, | A, P | | | |
| | N, V, W, F, D, E, G, L, | | | | |
| | S | | | | |
| 55 | D, E, S, V, T, C, P, I, A, Q | | | | |
| 56 | V, L, F, I, T, W, M, C, A | | | X | |
| 57 | M, A, C, G, I, T, S, L | V | | | |
| 58 | K, P, Q, N, A, G, T, H, C, S, D, | | | | |
| | R, E, M, I, L | | | | |
| 59 | P, I, Y, V, L | M, C, T, Q, W | | | |
| 60 | M, W, F, L | V, I | | X | |
| 61 | E, G, Q, D, A, S | | | | |
| 62 | K, R, N, A, L, P, Q, V, G, T, S, | | | | |
| | M, C, E, D, H, I | | | | |
| 63 | T, E, L, G, A, F, S, V, C, M, Q | | | | |
| 64 | M, L, C, S, T, V, I | | | X | |
| 65 | H, P, R, G, M, K, F, A, E, | T | | | |
| | N, S, L, Y, C, D, V, I, | | | | |
| | W, Q | | | | |

TABLE 13CCC
Tie2_mb2
SIDEELERLLEEAGVDPELIDDLYAVIYQLYIRGLSDKDVLRFLLENLERDGTPLRRVVEELLKR
SEQ ID NO: 1451

| | | | | | |
|---|---|---|---|---|---|
| 1 | D, F, C, T, N, Y, W, G, S, P, M, | | | | |
| | H, V, L, E, A, I | | | | |
| 2 | W, C, P, I, M, F, V, L, G, Y, E, | | | X | |
| | A, D, S, T, H | | | | |
| 3 | D, W, F, E, C, P, Y, N, T, | A | | | |
| | M, H, V, L, S, G, Q, I | | | | |
| | D, W, | | | | |
| 4 | P, C, D, E, F, Y, S, L, W | I | | | |
| 5 | V, C, F, I, Y, T, M, W, A, H, P, | | | | |
| | E, L, G, R, N, D, K, S, Q | | | | |
| 6 | S, T, C, V, M, L, I, G, P, A, E, | | | X | |
| | W, Q, H, N | | | | |
| 7 | P, F, E, L, W, Y, D, M, I, H | | | | |
| 8 | Y, W, P, F, A, G, M, C, E, V, L, | | | | |
| | D, I, Q, N, H, S, T, R, K | | | | |
| 9 | E, L, D, C, P, W, N, S, Y, A, M, | | | | |
| | F, I, Q, R, T, K, V, H | | | | |
| 10 | N, E, H, Q, P, C, D, K, L, | M | | X | |
| | G, T, R, Y, A, I, V | | | | |
| 11 | W, E, P, D, Y, Q, F, V, T, M, S, | | | | |
| | A, H, L, I, N, R, G, K | | | | |
| 12 | E, D, Q, K, G, S, R, N, P | | | | |
| 13 | D, P, E, A, H, Q, R, Y, K, T, N, | | | | X |
| | G, S, L, V, M, C, W | | | | |
| 14 | E, R, N, H, S, M, V, G, C, D, L, | | | | X |
| | K, Y, F, P, A, I, Q, T, W | | | | |
| 15 | V, C, T, I, E | | | X | |
| 16 | C, D, E, H, M, S, L, K, T, Q, F, | | | | X |
| | N, I, A, V, G, P, Y | | | | |
| 17 | E, D, C, Y, A, F, W, V, N, G, M, | | | | |
| | T, Q, S, P, I, L, H, K, R | | | | |
| 18 | C, E, D, M, I, S, N, L, A, P, V, | | | | |
| | G, T, Q, F, H | | | | |
| 19 | D, E, L, T, I , Q, C, N, A, H, S, | | | | |
| | V, P, M, Y, K | | | | |
| 20 | I, Q, V, S, E, M, R, C, F, W, T, | | | | |
| | G, Y, H, A | | | | |
| 21 | D, E, C, F, Y, A, Q, W, M, S, H, | | X | | |
| | N, G, L, T | | | | |
| 22 | D, Q, N, S, E, G, A, C, K, M, R | | X | | |
| 23 | V, L, T, C, M, N, A, S, I | | | X | |
| 24 | Y, V, E, T, Q, I, D, H, M, L, F, | | | | |
| | N, W, S, G, A, K | | | | |
| 25 | E, Q, D, N, G, A, C, M, H, V, S, | | X | | |
| | L, T, W, I, Y | | | | |
| 26 | V | | X | | |
| 27 | I, V, E, Y | | | X | |
| 28 | Y, N, F, C, A, E, W, G, I, | M | X | | |
| | D, V, H, P, L, S, Q, T | | | | |
| 29 | E, Q, D | | X | | |
| 30 | L | | X | | |
| 31 | Y, M, A, E, F, R, T, Q, I, S, L, | | | | |
| | V, W, C, H, K | | | | |
| 32 | I, M, L, V, C | | X | | X |
| 33 | I, L, V, R, T, M | | X | | X |
| 34 | G | | | | X |
| 35 | L, M | | | | X |
| 36 | G, R, H, W, N, A, Y, S, K, Q, F, | | | | X |
| | V, M, T, C, P, L, E, I, D | | | | X |
| 37 | D, N, C, E, F, W, G, H, Y, | M | | | |
| | R, S, T, L, K, Q, A, V, | | | | |
| | I, P | | | | |
| 38 | C, I, M, L, F, W, P, Y, V, E, K, | | | | |
| | D, Q, R, T, S, A, G, N, H | | | | |
| 39 | Q, A, G, S, N, E, T, C, D, M, H, | | | | |
| | R, K, Y, W | | | | |
| 40 | I, V, Q, W, T, M, C | | | | |
| 41 | L, C, F, M, I | | | | |
| 42 | Y, R, L, C, I, H, Q, V, K, G, S, | | | | |
| | M, A, F | | | | |
| 43 | Y, L, F, V, I, H | | X | | |
| 44 | C, I, V, L, T, M | | | X | |
| 45 | D, C, L, T, S, A, V, I, N, M, H, | | | | |
| | E, Y, K, R, Q, G, F | | | | |
| 46 | E, V, A, I, Q, D, C, T | | | | |
| 47 | N, H, Y, E, F, W, Q, T, S, M, V, | | X | | |
| | G, A, C, L | | | | |
| 48 | L, R, I | | | X | |
| 49 | P, E, D, A, V | | | | |
| 50 | D, E, V, Q, K, R, L, I, P, | N | X | | |
| | H, M, A, S, F, Y, T, W, | | | | |
| | C | | | | |
| 51 | D, E, N | | X | | |
| 52 | M, E, Y, L, F, D, Q, G, N, H, C, | | | | X |
| | K, A, S, R, W, V, T | | | | |
| 53 | T, S, G, A, C, N, L, H, K, P, Q, | | | | X |
| | D, M, E, F, R | | | | |
| 54 | P, M, I, D, A, V, Q, E, G, N, S, | | | | |
| | L, T, H | | | | |
| 55 | M, W, L, T, V, C, F, I, Y | | | | |
| 56 | I, Y, F, R, T, W, V, Q, M, A, C, | | | | |
| | L, P, S, N | | | | |
| 57 | P, R, T, L, M, S, E, G, D, N, A, | | | | |
| | F, H, V, K, Y, I, W, Q, C | | | | |
| 58 | Y, V, H, C, T, W, P, F, L, I, M, | | | X | |
| | S, N, A, Q, G, E | | | | |
| 59 | C, V, I, L, M, T | | | X | |
| 60 | F, W, E, A, Y, C, Q, S, N, | V | | | |
| | R, T, G, H, M, K, D, L | | | | |
| 61 | D, N, E, H, Q, S, M, C, R, F, K, | | | | |
| | A, T, G, W, Y, V, I | | | | |
| 62 | H, Y, L, E, C, T, Q, S, E, V, A, | | | X | |
| | R, M, K | | | | |
| 63 | H, N, L, W, A, S, Y, Q, F, T, V, | | | | |
| | E, M, D, C | | | | |
| 64 | F, W, T, I, L, A, C, M, V, Y, E, | | | | |
| | D, K, S, R, N, H, Q, P, G | | | | |
| 65 | C, A, R, D, V, Q, K, T, L, S, N, | | | | |
| | H, G, I, Y, E, M, F | | | | |

TABLE 13DDD
Tie2_mb3
SVEEFLKKLVEEFGVPPEEVERALEIIARLLNVPPEAALFFLIAIILDYNVPPEEAVEIVRRNVT
(SEQ ID NO: 1452)

| | | | | | |
|---|---|---|---|---|---|
| 1 | W, F, E, Y, D, C, G, M, N, | Q, K, A | X | | |
| | S, H, L, R, P, T, V | | | | |
| 2 | D, E, N, L, T, Q, H, M, V, C, | | X | | |
| | A, P, S, F, I, Y | | | | |
| 3 | D, E, S, R, H, K, T, N, P, | Q, A, I, L, V, G | | | |
| 4 | E, P, R, M, S, Y, A, G, H, D, F, | | | | |
| | Q, C, V, W, K, N, T, L, I | | | | |
| 5 | E, Q, D, T, V, F, I | C, L, W, Y, N, R | X | | |
| 6 | I, V, R, N, L, D | S, K, W, C, T, Q, Y, A, E, P, H | | | |
| 7 | G, A, D, E, V, C, S, T, I, | H, R | | | |
| | N, E, M, Q, Y, P, L, K | | | | |
| 8 | C, D, H, Q, A, N, L, V, E, | W | | | |
| | T, M, S, I, Y, G, E, K, | | | | |
| | R, P | | | | |
| 9 | F, M, I, V, A, S, C, E, G, | T | | X | |
| | W, Q, L, H, Y | | | | |
| 10 | Y, H, N, S, F, A, E, C, W, | Q, P, V, I, L, K, G | | | |
| | T | | | | |
| 11 | D, C, E, T, R, N, M, H, A, S, | | | | |
| | Y, Q, K, L, G, W, F, V | | | | |
| 12 | E, T, H, M, Q | | | | |
| 13 | L, I, G, V, A, C, T, F | Y, E, M, W | | X | |
| 14 | E, D, Q, H, T, G, V, M, R, S, | | | | X |
| | A, N, C, L, F, Y | | | | |
| 15 | C, A, I, M, N, V, G, Q | E, W, S, L, T | | X | X |
| 16 | D, C, I, E, N, V, A, Q, P, | F, Y, K, M, H, R, G | | | X |
| | S | | | | |
| 17 | Y, H, M, I, L, R, F, K, Q, | P, N, D, G, S, C, W | | | |
| | E, V, A, T | | | | |
| 18 | W, I, E, V, F, S, L, N, M, D, | | | | |
| | Y, Q, H, G, A, K, C, T, R | | | | |
| 19 | D, Q, E, P, V, Y, T, C | | | | |
| 20 | Y, L, I, H, T, V, W, G, C | A, P, M | | | |
| 21 | C, R, E, D, G, W, Q, L, Y, M, | | | | |
| | K, T, A, I, H, N | | | | |
| 22 | F, C, Y, A, E, Q, L, M, H, | P, V, K | | | |
| | I, S, T, D, G, N, W, R | | | | |
| 23 | D, L, W, N, Y, Q, A, M, F | S | | X | |
| 24 | L, M, H | | | | |
| 25 | C, Y, W, M, F, H, L, V, D, | R, N, Q, A, G, S, T | | | |
| | I, E | | | | |
| 26 | Y, L, W, H, F, A, G, C, M, | D, Q, E | | | |
| | V, S, I | | | | |
| 27 | V, C, I, L, M, T, S | | | X | |
| 28 | C, M, A, S, Q, I, E, V, T | | | | |
| 29 | C, E, N, H, D, A | T, R, Q, M, G, F, V, Y, L, W, S, K | | | |
| 30 | F, H, Y, V, T, C, W, M, Q, | A, N | | X | |
| | L, I | | | | |
| 31 | Y, M, W, C | L, H, S, F, T | X | | X |
| 32 | C, N, E, S, H, G, K, M, Q, L | | | | X |
| 33 | C, V, T, I, W, S, A, K | | X | | X |
| 34 | N, P, R, E, T, Q, V, H, S, | | | | X |
| | K, G, A, D, L | | | | |
| 35 | M, P, N, S, H, R, Y, Q, A, C, | | | | |
| | V, T, L, G, E, K, I, D, W | | | | |
| 36 | N, E, S, Q, D, P, H, C, A, | | X | | |
| | T, G, Y, E, V, K | | | | |
| 37 | I, V, T, E, D, Q, A | L, M, C, N, H, G, S, R, | X | | |
| | | K | | | |
| 38 | A, S, G, C | | | X | |
| 39 | M, I, E, A, W, V, S, H, L, | Q, Y, F, C, G, P | | | |
| | R, T | | | | |
| 40 | W, Y, F, C | I | X | | |
| 41 | Y, P, I, E, C, V, L, M, F | S, D, A | X | | |
| 42 | Y, M, L | F | | X | |
| 43 | L, M, T, I | V, C | X | | |
| 44 | C, M, L, I, T, V | A, S, N | X | | |
| 45 | Y, M, S, A, L, I, V | | | X | |
| 46 | F, L, T, I | S, M, A, C | | X | |
| 47 | M, I, V, R, T, Q, C, W, L | A, F, K, S | X | | |
| 48 | D, T, E | | X | | |
| 49 | Y, R | | X | | |
| 50 | D, E, S, K, N, G | | | | X |
| 51 | V, I, C, M, A, L | | | | X |
| 52 | E, D, Y, V, Q, C, P, H, A, I, L, | | | | X |
| | F, M | | | | |
| 53 | W, P, C, Y, G, A, V, T | | | X | |
| 54 | P, E, I, K, H, N, D, T, Q, V, C, | | | | |
| | L, F, A, S, R, G | | | | |
| 55 | D, N, L, C, E, R, M, V, K, Q, | | | | |
| | S, G, T, A, P, Y, H, I, F | | | | |
| 56 | Y, I, V, A, F, L, Q, M, N, T, S, | | | X | |
| | H, C, E | | | | |
| 57 | N, T, Q, G, V, A, Y, I, K, H, | | | | |
| | F, L, S | | | | |
| 58 | D, E, I, P, V, Q, N, S, C, T, | | | | |
| | G, H, L, Y, K, W, A, M, R, F | | | | |
| 59 | E, D, L, A, V, P, S, Q, T, | W | | | |
| | G, M, Y, N, R, I, H, F | | | | |
| 60 | D, N, P, T, G, S, A, V, E, | W | X | | |
| | M, Q, E | | | | |
| 61 | Q, S, N, A, T, E, P, G, H, D, V, | | | | |
| | R, W, K, M, Y | | | | |
| 62 | D, E, P, T, R, I, F, V, K, L, M, | | | | |
| | Y, G, H, S, A, W | | | | |
| 63 | P, E, A, G, N, T, R, S, H, Q, C, | | X | | |
| | V, K, M | | | | |
| 64 | R, G, P, E, K, D, N, V, S, A, Q, | | | | |
| | H, Y, M, I, L, C | | | | |
| 65 | N, S, Q, E, I, T, V, K, D, R, H, | | X | | |
| | G, M, Y, F, L, A, W, P, C | | | | |

TABLE 13EEE
Tie2_mb4
DESAAEQIARLLIQGDPAAKQTVRAFVQAAKRGNPAAKRALEVIRKVLRKLGNPEVVKKVKKLIK
(SEQ ID NO: 1453)

| | | | | | |
|---|---|---|---|---|---|
| 1 | L, M, T, V, Y, P, C, D, A, I, N, Q, | | | | |
| | G, H, R, E, K, S, F, W | | | | |
| 2 | C, V, F, D, G, E, N, P, Y, S, T, M, | | | | |
| | H, K, R, L, A, I, Q | | | | |
| 3 | K, Q, I, A, W, C, F, S, G, Y, T, L, | | X | | |
| | P, R, M, D, E, V, N, H | | | | |
| 4 | R, W, V, T, N, I, S, G, P, H, Q, A, | | X | | |
| | C, L, M, Y, F, D, K, E | | | | |
| 5 | M, H, P, A, V, S, E, N, L, F, G, C, | | | X | |
| | I, Y, W, T | | | | |
| 6 | K, I, V, Q, S, M, E, N, G, Y, A, | | | | |
| | F, R, L, H, W, T | | | | |
| 7 | M, F, C, L, V, Q, D, E, K, S, W, | | X | | |
| | I, N, Y, T, A, R, G, H | | | | |
| 8 | I, V, W, L, M | | X | | |
| 9 | A, G | | | X | |
| 10 | K, V, F, L, R, M, W, T, Y, G, C, | | | | |
| | H, I, A, S, Q, N, E | | | | |
| 11 | G, N, S, R, K, L, C, D, M, Q, W, | | X | | |
| | F, A, Y, H, E | | | | |
| 12 | F, L, M | | | X | |
| 13 | W, F, Y, E, D, S, L, A, I, T, N, V, | | | | |
| | M, C, Q, H, K, R | | | | |
| 14 | S, I, Y, M, W, Q, K, H, L, F, T, | | | | |
| | A, D, R, V, E, N, C, G | | | | |
| 15 | W, N, G, D, Q, H, S, K, R, Y, C, | | | | X |
| | A, F, P, E | | | | |
| 16 | H, D, V, Y, N, S, Q, K, A, | E, M, R | | | X |
| | I, L, F | | | | |
| 17 | N, L, T, W, V, Q, P, D, I, K, R, E, | | | | |
| | Y, M, H, F, A, S, G, C | | | | |
| 18 | R, H, W, V, C, A, N, F, Y, Q, K, S, | | X | | |
| | M, I, G, E, T, L, D | | | | |
| 19 | A, T, V | | | X | |
| 20 | K, I, V, R, M, W | | | | |
| 21 | W, Y, F, R, N, Q, H, M, I, L, S, | | X | | |
| | C, K, V, A, G, T | | | | |
| 22 | I, V, R, C, A, T, M, Y, L, H, E, | | X | | |
| | K, Q, S, W, N | | | | |
| 23 | V, L, I | | | X | |
| 24 | Y, F, W, H, R, K, A | | | | |
| 25 | K, Y, M, V, F, T, A, L, W, S, R, | | X | | |
| | Q, G, N, I, C, H | | | | |
| 26 | Y, L, F, W, A, M, I, C | | X | | |
| 27 | V, W, F, Y | | | | |
| 28 | F, Q, H, W, V, R, Y, K, M, I, N, | | X | | |
| | T, G, L, S, A | | | | |
| 29 | E, A, L, W, Y, M, S, R, K, Q, F, | | X | | |
| | H, C, N | | | | |
| 30 | A | | | | |
| 31 | K, R | | | | |
| 32 | R, C, S, A, K, G, N | | | | |
| 33 | G, K | | | | X |
| 34 | N, H, C, D, S, A, F, Y, V, Q, W, K | | X | | X |
| 35 | V, T, R, P, K, M, C, H, G, L, N, | | | | |
| | F, S, Y, Q, I, W, E, A | | | | |
| 36 | G, H, A, C, S, K, Q, V, R, T, N, E, | | X | | |
| | L, D, I, Y, F, W, M | | | | |
| 37 | A, C, S | | X | | |
| 38 | K, R | | | | |
| 39 | M, R, A, K, W, C, Q, Y, S, H, N, | | | | |
| | E, L, G, T, F, V, D, I | | | | |
| 40 | Q, F, K, R, S, A, C, T, M, Y, L, | | | | |
| | V, I, E, N, W, H | | | | |
| 41 | L | | | | |
| 42 | K, E, S, H, W, N | | | | |
| 43 | S, R, G, D, C, K, N, Q, V, H, W, | | | | |
| | A, T, M, L, E, I, Y, F | | | | |
| 44 | L, I, V | | | X | |
| 45 | H, Y, R, A | | | | |
| 46 | D, M, G, Q, K, T, N, L, V, S, A, | | | | |
| | R, I, H, W, Y, E | | | | |
| 47 | Q, E, V, T, W, C, K, Y, S, H, N, | | | X | |
| | I, A, M, G, L, R, F | | | | |
| 48 | L, F, M, I | | | X | |
| 49 | R, G, Q, K, W, V, H, A, N, M, S, | | | | |
| | Y, I, T, D, F, L | | | | |
| 50 | G, S, E, K, D, R, H, A, I, Y, L, | | | | |
| | M, N, Q, W, V, F, T, C | | | | |
| 51 | N, D, R, V, Q, S, F, G, E, | C | | X | X |
| | A, H, L, K, T, I, M, W, | | | | |
| | P, Y | | | | |
| 52 | D, E, T, N, G, H, S, P, C, | F | | | X |
| | Q, Y, A, I, M | | | | |
| 53 | P, N, D, E, S, K, T, C, G, Q, R, A | | | | X |
| 54 | G, P, D, H, K, Q, N, R, C, M, A, | | | | |
| | E, S, V, T, L, Y | | | | |
| 55 | E, D, C, K, R, A, Q, W, T, V, S, N | | | | |
| 56 | K, H, T, Y, R, V, Q, N, G, S, I, | | | X | |
| | W, C, M, D, P, A, E | | | | |
| 57 | N, R, S, V, P, Q, A, D, T, E, K, | | | | |
| | G, H, C, Y | | | | |
| 58 | K, R, G, H, Q, S, T, N, P | | | | |
| 59 | K, G, R, H, V, S, T, N, I, A, B | | | | |
| 60 | V, G, T, Y, D, P, E, C, W, I, A, | | | X | |
| | M, K, S, L, Q, H, R, F | | | | |
| 61 | K, R, P, A, T, H, V, Q, Y, N, S, | | | | |
| | G, F, C, I | | | | |
| 62 | C, T, K, N, Q, H, P, V, M, S, L, | | | | |
| | G, A, Y, I, F | | | | |
| 63 | L, E, Y, M, F, C, W, I, A, V, Q, | | | | |
| | K, G, T, D, P | | | | |
| 64 | Y, M, I, C, W, L, F, V, E, G, A, | | | | |
| | T, D, N, K, Q, R | | | | |
| 65 | R, K, F, N, I, Q, V, S, L, T, W, | | | | |
| | M, H, Y, P, G, E, A | | | | |

TABLE 13FFF
TrkA_mb1
RDEIKERIFKAVVRAIVTGNPEQLKEAKKLLEKLKKLGRLDQDAKKFEKAIRQVEKRLRS
SEQ ID NO: 1457

| | | | | | |
|---|---|---|---|---|---|
| 1 | A, Q, S, G, E, R, D | V | | | |
| 2 | H, E, Y, D, F | | | | |
| 3 | E, I, D, C, S | | | | |
| 4 | I, V, L | Y | | X | |
| 5 | I, N, V | M, T, K | | | |
| 6 | E, R | | X | | |
| 7 | R, K, Q, A, C, E | | | | |
| 8 | M, I | | | X | |
| 9 | K, F | | X | | |
| 10 | W | R, K, H | X | | |
| 11 | V, I, Q, T | A | | X | |
| 12 | V | I | X | | |
| 13 | | | X | | |
| 14 | R | | X | | |
| 15 | A, S | | | X | |
| 16 | I | K, V, R | X | | |
| 17 | C,V | | X | | |
| 18 | K | T | | | |
| 19 | H, K | R, S, A, N, Y, G | | | X |
| 20 | N, R, K, Q | T, C, M, E, Y, D, I, W | | | X |
| 21 | A, P, V, K, C, L, I | | | | |
| 22 | N, G, S, E, C, D, R, T | | | | |
| 23 | R, K, W, N, H, F, Q, Y | I, P, C, V, M, L | | X | |
| 24 | L | | | | |
| 25 | T, G, N, I, R, V, K, C, E, Q, | | | | |
| | S, H | | | | |
| 26 | D, C, I, G, E, V, Y | | | | |
| 27 | A, P | | | X | |
| 28 | E, D, R, M, H, T, K, A, W, S | | | | |
| 29 | K | | | | |
| 30 | I, F, Y, C, T, V, N, L, M, | S | | X | |
| | H | | | | |
| 31 | V, I | L | | | |
| 32 | F, E, N, D, Y, T, C, V, M | | | | |
| 33 | C, K, S, R, T, D, Q, M, F | | | | |
| 34 | M, L, I | | | X | |
| 35 | A, H, F, S, K, R, Y, G | I | | | |
| 36 | R, Q, H, S, K, L, F, M, C, | T, E | | | |
| | D, I, G, V | | | | |
| 37 | T, Y, F, L, Q, I | C | | | |
| 38 | P | G, A, S | | | X |
| 39 | C, P, G, D, A, R, S, H, N, | V | | | X |
| | T, M, K, Q | | | | |
| 40 | W, Y, F, P, I | V, N, A, M, Q, T, L, E, H, C, S, G | | | X |
| 41 | D | | | | X |
| 42 | T, M, L, H, Q, R, A, I | Y | | | |
| 43 | A, G, E, D, Q, P | S | X | | |
| 44 | E, Y, T | V, G, I, A, C, F | | X | |
| 45 | Y, K, M, R, H, L | I | | | |
| 46 | K | Q, A | X | | |
| 47 | F | L | X | | |
| 48 | E, W, V | | | | |
| 49 | K, R | | | | |
| 50 | A, M, H | | X | | |
| 51 | I, C | V, T | | | |
| 52 | Y, F, H | G, I, S, W, R, V, K | | | |
| 53 | K, R, S, N, G, L, Q, V, T, | F | X | | |
| | E, A, M, D, I, H | | | | |
| 54 | V, C, Q | | X | | |
| 55 | A, G, E, S, Q | | | | |
| 56 | K, R | | | | |
| 57 | R, K | Q | | | |
| 58 | L | | | | X |
| 59 | R, Q, S | | | | |
| 60 | K, C, A, G, S, H, Q | N, R | | | |

TABLE 13GGG
TrkA_mb2
DEIEKRLRTALEELVRADKNNDEEKVRKAWQKAVQIVIEANDDNVSKLASKIYRELAKRVKS
(SEQ ID NO: 1458)

| | | | | | |
|---|---|---|---|---|---|
| 1 | I, T, N, P, C, H, E, F, V, Q, G, | | | | |
| | L, Y , R, D, S, A, M, W, K | | | | |
| 2 | S, C, D, W, P, G, Q, T, H, K, E, R, | | | | |
| | M, I, L, F, A, V, N, Y | | | | |
| 3 | Q, A, M, Y, C, K, V, R, F, H, L, | | | | |
| | N, W, T, I, S, G, E | | | | |
| 4 | I, Y, D, V, K, H, T, R, G, A, S, | | | | |
| | Q, N, E, L, P, F | | | | |
| 5 | C, E, H, P, D, F, I, T, W, N, A, | | | | |
| | V, Q, S, L, Y, G, K, M, R | | | | |
| 6 | P, Y, H, V, C, M, W, A, E, L, I, | | | | |
| | F, T, K, D, R, G, S, Q, N | | | | |
| 7 | L, I | | | X | |
| 8 | K, W, S, Y, V, Q, H, T, E, R, I, | | | | |
| | C, M, A, N, L, G, E, D, P | | | | |
| 9 | V, I, C, W, E, D, A, Y, R, T, N, | | | | |
| | M, P, F, S, G, K, H, L, Q | | | | |
| 10 | N, Q, V, E, Y, S, C, I, H, P, W, | | | X | |
| | A, T, F, L, R, G, M, K | | | | |
| 11 | M | V, I, L | X | | |
| 12 | W, G, T, S, M | F, C, R, L, K, D, H, V, A, E, N | | | |
| 13 | M, Q, A, Y, W, G, D, F, L, T, K, | | | | |
| | H, C, R, E, N, V, S | | | | |
| 14 | L, M, Y | | X | | |
| 15 | I, L, T, C, V, A, H, Y, D, N, R | | | X | |
| 16 | W, Y, C, D, I, A, G, E, K, Q, H, | | | | |
| | L, M, V, F, R, S, N, T | | | | |
| 17 | G, Y, S, W, A | H | | X | |
| 18 | L, N, I, R, V, H | K, E, G, T, F, M, W, Q, | X | | |
| | | S, A, Y, D | | | |
| 19 | F, Y, T, D, S, E, L, G, A, V, Q, | | | | |
| | I, W, K, H, C, N, R, M | | | | |
| 20 | C, H, D, F, M, E, Q, L, W, S, T, | | | | X |
| | V, A, G, Y, R, N, I, K, P | | | | |
| 21 | K, R, H, Y, T, E, C, D, V, L, F, | | | | X |
| | A, M, Q, N, S, G | | | | |
| 22 | E, M, F, Y, V, C, H, L, I, R, A, | | | | X |
| | S, K, N, W, D, Q | | | | |
| 23 | Q, G, Y, L, A, N, V, F, I, S, D, | | | | |
| | T, M, K, P, R, E, H, W | | | | |
| 24 | Y, C, F, G, M, R, Q, H, K, L, E, | | | | |
| | W, D, N, S, V, I, A, P, T | | | | |
| 25 | D, E, P, L, A, G, H, Y, C, M, Q, | | | | |
| | V, R, T, I, K, N, S, F, W | | | | |
| 26 | L | R, N, A, S, G, E, Y, Q, K, V | | | |
| 27 | W, R | A, T, K, D, H, E, G, N, S | | | |
| 28 | M, L, Y, T, I, E, H, V, N, F, Q, | | | | |
| | R, W, D, P, A, C, G, S, K | | | | |
| 29 | Q, W, S, N, Y, M, G, C, H, F, A, | | | X | |
| | T, K, L, V, E, I | | | | |
| 30 | F, W, K, S, G, Y, A, C, R, M, L | | X | | |
| 31 | N, T | W, I, R, V, E, K, M, D, | X | | |
| | | S, Q, A, H | | | |
| 32 | W, N, M, G, Y, E, F, D, V, C, L, | | | | |
| | H, T, K, I, A, S, R, Q | | | | |
| 33 | T, V | N, S, A | X | | |
| 34 | I, V, L | | X | | |
| 35 | K, L, M, R, I, Y, F, H, T, W | S, C, E, G, N, A, Q | X | | |
| 36 | V, C, M, Y, L, T, I, A, W, F | | | X | |
| 37 | I, V, L, N | | X | | |
| 38 | I | | X | | |
| 39 | R, M, H, K, F, Y, Q, W, L, | V, C, D, E | | | |
| | A, S, N, T, G, I | | | | |
| 40 | T, Q, G, C, S, A, E, V, N, M, L, | | | X | |
| | I, P, W | | | | |
| 41 | A, G, K, R, H, D, Q, S, N, C, M, | | X | | |
| | T, Y, L, W, I | | | | |
| 42 | N, S, D, E, H, V, I | | | | X |
| 43 | S, A, P, G, H, E | T, F, W, Y, V, N, L, K, | X | | |
| | | R, Q, M, D | | | |
| 44 | K, R, C, H, I, W, E, A, G, D, M, | | | | |
| | F, Y, V, L, Q, N, T, S | | | | |
| 45 | A, T, I, V, F, Y, M, L, G, R | | | | |
| 46 | N, A, S | | X | | |
| 47 | H, N | D, S, G, I, V, E, P, F, Q, T, Y, | | | |
| | | M, A, K | | | |
| 48 | M, L, I, V | | | | |
| 49 | C, A, T | | X | | |
| 50 | T, S, G, C, A, F, Y, P | | X | | |
| 51 | D, R, Y, E, N, M, C, G, T, L, V, | | | | |
| | S, A, Q, K, H, W, I | | | | |
| 52 | L, V, I, W, T, M, Y, C, A, F, N | | | X | |
| 53 | W, Y, H | | X | | |
| 54 | K, N, R, G, H, L, C, S, P | | X | | |
| 55 | N, A, T, D, Q, S, H, M, E, Y, G, | | | | |
| | F, L, K, V, I | | | | |
| 56 | E, A, T, M, V, L, I, S, F, N, Q, | | | X | |
| | H, P | | | | |
| 57 | D, N, L, T, M, H, V, R, K, Q, E, | | | | |
| | I, Y, A, S, F, G, P | | | | |
| 58 | F, P, T, Y, G, N, Q, W, R, L, S, | | | | |
| | V, H, D, I, M, E, K, A, C | | | | |
| 59 | K, H, N, I, L, D, E, Q, F, P, W, | | | | |
| | G, V, T, Y, A, M, R, S, C | | | | |
| 60 | Y, I, R, A, P, N, M, G, D, K, S, | | | X | |
| | W, T, Q, H, V, E, F, L | | | | |
| 61 | I, Y, D, S, T, P, G, A, F, W, L, | | | | |
| | E, R, K, Q, H, N, M, V | | | | |
| 62 | R, L, E, F, I, M, H, W, T, Q, K, | | | | |
| | A, G, N, S, Y, P, C, V, D | | | | |

TABLE 13HHH
VirB8_mb1
NAEEITEKATLVGIEAWLLAKDEEQKKKVRTLNRQVKKLLQQNDLDQAKRVLDQLKSVLEDLKS
(SEQ ID NO: 1468)

| | | | | | |
|---|---|---|---|---|---|
| 1 | G, A, Q, K, E, N, S, R, V, | C, W | | | |
| | D, I, P, F, T, L, H, M, | | | | |
| | Y | | | | |
| 2 | Q, H, A, K, S, P, R, T, G, | F, I | X | | |
| | E, N, V, D, Y, M | | | | |
| 3 | I, V, M, L, D, P, E, A, Q, | T, H, W, G | X | | |
| | S, N, E | | | | |
| 4 | E, D, A, Q, V, W, Y, S, M, | I, L, N, F | X | | |
| | T | | | | |
| 5 | I, L, T, V | M | | X | |
| 6 | T, S, A, Q, M, V, H, Y, L, | E, R, F, G, D | X | | |
| | W, N, I | | | | |
| 7 | E, T | G | X | | |
| 8 | Q, A, S, D, G, K, N, H, R, | C, T, M | | | |
| | E | | | | |
| 9 | D, S, A, T, M, C, G, V, P | | | X | |
| 10 | T, V, P | I | X | | |
| 11 | Q, L, F, I, M, R, P | | X | | |
| 12 | T, W, V, N, M, I, Y, F, A | L, S | | X | |
| 13 | G, S, A | E, V | X | | |
| 14 | N, I, L, S | | X | | |
| 15 | E, D | A | X | | |
| 16 | E, A, S, C | | | X | |
| 17 | G, R, L, W, C, Y, N | | X | | |
| 18 | L, V, K, I, R, M | F | X | | |
| 19 | L, M, T, E, I | | | | X |
| 20 | V, A, E, T, S, G | | | | X |
| 21 | P, D, E, K, T, S, Q, V, A, | N, H, M | | | X |
| | R, G | | | | |
| 22 | D, Y, N, A, T, E | S | | | X |
| 23 | Q, E, A, D, N, P, H, T, L, | M, C | | | |
| | S, V, I, K, Y, R, F, G, | | | | |
| | W | | | | |
| 24 | E, K, N, G, R, S, Q, D, T, | L, M, | | | |
| | A, P, H, Y, V, I | | | | |
| 25 | Q, E, D, T, M, G, H, K, N, | Y, R | | | |
| | S, A, V, I, C, L | | | | |
| 26 | K, R, N | | | | |
| 27 | E, G, M, T, S, A, H, N, Q, | W | | | |
| | I, K, L, V, R, D, F, C, | | | | |
| | Y | | | | |
| 28 | E, Y, H, Q, N, T, R, K, D, | W | | | |
| | M, S, L, F, I, A, G, V, | | | | |
| | C | | | | |
| 29 | E, L, I, V, C | | X | | |
| 30 | Q, T, V, A, I, R, K, S | C, M, L, H, E, G | X | | |
| 31 | D, G, N, T, H, S, P, R, Q, | W | | | |
| | M, E, V, C, I, F, A, Y, | | | | |
| | K, L | | | | |
| 32 | L, K, M, Y, H, Q | C, S, I | | X | |
| 33 | N, S, M, A | T, V, D, G | X | | |
| 34 | G, T, I, H, A, S, M, R, V | Q, K, Y, F, L, W, N, E | X | | |
| 35 | D, Q, E, N, H, T, K, R | S, M, L | | | |
| 36 | G, I, V, C, L, T, N, M, A, F | | | X | |
| 37 | N, L, T, R, S, K | P, G, H, Q | X | | |
| 38 | M, I, V, T, Q, C, L, N, E, Y, A, W, | | | | |
| | H, S, D, E, K, R, G | | | | |
| 39 | D, E, A, S, H, N, F, C, Y, | R, W | | X | |
| | K, M, Q, L, T, G | | | | |
| 40 | I, L, V, T, W, C | F, M, A | | X | |
| 41 | E, D, A, Q, M, S, N, T, H, | F | | | |
| | Y, L, V, G, I, K, W, R | | | | |
| 42 | V, Q, E, I, N, A, T, D, M, | | | | X |
| | K, S, L, R, H, C, Y, G, F, W | | | | |
| 43 | G, H, N, K, Q, D, S, E, Y, | I, F | | | X |
| | R, A, C | | | | |
| 44 | V, M, Q, D, E, L, N, K, R, H, | | | | |
| | A, Y, C, S, G | | | | |
| 45 | L, C, F, N, M, Y, W, T, I, V, | | | | |
| | H, S, A, P, Q, E, R, D, K, G | | | | |
| 46 | A, E, Q, M, V, D, K, S, T, | C,W, P | | | |
| | I, N, L, R, H, G, Y, F | | | | |
| 47 | G, K, Q, R, S, A, N, M, E, | D, V, I | | | |
| | T, H, L, C | | | | |
| 48 | E, S, T, A | | | X | |
| 49 | A, S, N, L, R, I, K, T, Q, | D, C | | | |
| | M, Y, E, V, W, G, F, H | | | | |
| 50 | K, A, R, L, I, D, Q, E, T, | W | | | |
| | N, V, S, H, M, Y, G, C, | | | | |
| | F | | | | |
| 51 | F, D, V, T, A, K, C, I, M, S, G, | | | | X |
| | L, Y, H, Q | | | | |
| 52 | L, V, T, M | | | | |
| 53 | D, M, I, V, A, L, S, E, N, F, Q, H, | | | | |
| | C, T, R, K, G, Y, W | | | | |
| 54 | Q, E, T, N, H, K, R, V, D, | G | | | |
| | S, I, A, L, M, C | | | | |
| 55 | L, M | F | | | X |
| 56 | E, T, S, A, V, Y, G, M, Q, | L | | | |
| | H, R, C, K, N, F, I, W, | | | | |
| | D | | | | |
| 57 | F, W, Q, T, D, M, G, H, S, N, V, | | | | |
| | E, Y, L, A, R, C, I, K | | | | |
| 58 | V, L, I, G, M, T | F | | | X |
| 59 | L | Y, H, W, C | | | |
| 60 | Q, D, E, N, S, A, H, Y, M, | K, V, I, G, T, W, L, F, C | | | |
| | R | | | | |
| 61 | D, E, N, G, Q, S, H, K, T, | F, Y, C, V, I | | | |
| | M, W, A, R | | | | |
| 62 | P, I, L, V, M, Q, K | | | | X |
| 63 | R, K, Q, H | | | | |
| 64 | E, M, K, N, Y, R, S, Q, D, | P | | | |
| | G, L, F, T, V, H, A, I, | | | | |
| | C, W | | | | |

[0032] In one embodiment, amino acid substitutions relative to the reference polypeptide are conservative amino acid substitutions. As used herein, “conservative amino acid substitution” means a given amino acid can be replaced by a residue having similar physiochemical characteristics, e.g., substituting one aliphatic residue for another (such as Ile, Val, Leu. or Ala for one another), or substitution of one polar residue for another (such as between Lys and Arg, Glu and Asp, or Gln and Asn). Other such conservative substitutions, e.g., substitutions of entire regions having similar hydrophobicity characteristics, are known. Polypeptides comprising conservative amino acid substitutions can be tested in any one of the assays described herein to confirm that a desired activity. e.g. antigen-binding activity and specificity of a native or reference polypeptide is retained. Amino acids can be grouped according to similarities in the properties of their side chains (in A. L. Lehninger, in Biochemistry, second ed., pp. 73-75, Worth Publishers, New York (1975)): (1) non-polar: Ala (A), Val (V), Leu (L), Ile (I), Pro (P), Phe (F), Trp (W), Met (M); (2) uncharged polar: Gly (G), Ser (S), Thr (T), Cys (C), Tyr (Y), Asn (N), Gin (Q): (3) acidic: Asp (D), Glu (E); (4) basic: Lys (K), Arg (R). His (H). Alternatively, naturally occurring residues can be divided into groups based on common side-chain properties: (1) hydrophobic: Norleucine, Met, Ala, Val, Leu, Ile; (2) neutral hydrophilic: Cys, Ser, Thr, Asn, Gln; (3) acidic: Asp, Glu; (4) basic: His, Lys, Arg; (5) residues that influence chain orientation: Gly, Pro; (6) aromatic: Trp, Tyr, Phe. Non-conservative substitutions will entail exchanging a member of one of these classes for another class. Particular conservative substitutions include, for example; Ala into Gly or into Ser; Arg into Lys; Asn into Gln or into H is; Asp into Glu; Cys into Ser; Gln into Asn; Glu into Asp; Gly into Ala or into Pro; His into Asn or into Gln; Ile into Leu or into Val; Leu into Ile or into Val; Lys into Arg, into Gln or into Glu; Met into Leu, into Tyr or into Ile; Phe into Met, into Leu or into Tyr; Ser into Thr; Thr into Ser; Trp into Tyr; Tyr into Trp; and/or Phe into Val, into Ile or into Leu.

[0033] In some embodiments, the percent identity of the polypeptide to the reference polypeptide does not include any functional domains added fused to the polypeptides (whether N-terminal, C-terminal, or internal), and wherein the 1, 2, 3, 4, or 5 N-terminal and/or C-terminal amino acid residues may be present or absent when considering the percent identity.

[0034] In another embodiment, 1, 2, 3, 4, or 5 N-terminal and/or C-terminal amino acid residues are not included when determining the percent identity of the polypeptide relative to the reference polypeptide. In another embodiment, all residues are included when determining the percent identity relative to the reference polypeptide.

[0035] In another embodiment, the disclosure provides fusion proteins comprising the polypeptide of any embodiment disclosed herein fused to a functional polypeptide. Any suitable functional polypeptide may be used, including but not limited to a therapeutic polypeptide, diagnostic polypeptide, targeting polypeptide, scaffold polypeptide, or polypeptide that confers stability on the fusion protein. Such fusion proteins may be used, for example, to target the functional polypeptide to the target of the polypeptides of the disclosure in or on cells. In one embodiment, the fusion protein comprises two or more copies of the polypeptide of any embodiment of the target binding polypeptides of the disclosure. In one such embodiment, the two or more copies of the polypeptide are identical. In the embodiments, the two or more copies of the polypeptide are not all identical. In all these embodiments, the fusion protein components may be directly adjacent in the fusion protein, or may be separated by an amino acid linker of any suitable length and amino acid composition.

[0036] In another embodiment, the disclosure provides scaffolds comprising 2, 3, 4, 5, 6, 7, 8, 9, 10, 11, 12, 13, 14, 15, 16, 17, 18, 19, 20, or more copies of the polypeptide or fusion protein of any embodiment disclosed herein. Any suitable scaffold can be used, including but not limited to designed polypeptide scaffolds, virus-like particles, beads, etc.

[0037] In another aspect the disclosure provides nucleic acids encoding the polypeptide or fusion protein of any embodiment or combination of embodiments of the disclosure. The nucleic acid sequence may comprise single stranded or double stranded RNA (such as an mRNA) or DNA in genomic or cDNA form, or DNA-RNA hybrids, each of which may include chemically or biochemically modified, non-natural, or derivatized nucleotide bases. Such nucleic acid sequences may comprise additional sequences useful for promoting expression and/or purification of the encoded polypeptide, including but not limited to polyA sequences, modified Kozak sequences, and sequences encoding epitope tags, export signals, and secretory signals, nuclear localization signals, and plasma membrane localization signals. It will be apparent to those of skill in the art, based on the teachings herein, what nucleic acid sequences will encode the polypeptides of the disclosure.

[0038] In a further aspect, the disclosure provides expression vectors comprising the nucleic acid of any aspect of the disclosure operatively linked to a suitable control sequence. “Expression vector” includes vectors that operatively link a nucleic acid coding region or gene to any control sequences capable of effecting expression of the gene product. “Control sequences” operably linked to the nucleic acid sequences of the disclosure are nucleic acid sequences capable of effecting the expression of the nucleic acid molecules. The control sequences need not be contiguous with the nucleic acid sequences, so long as they function to direct the expression thereof. Thus, for example, intervening untranslated yet transcribed sequences can be present between a promoter sequence and the nucleic acid sequences and the promoter sequence can still be considered “operably linked” to the coding sequence. Other such control sequences include, but are not limited to, polyadenylation signals, termination signals, and ribosome binding sites. Such expression vectors can be of any type, including but not limited plasmid and viral-based expression vectors. The control sequence used to drive expression of the disclosed nucleic acid sequences in a mammalian system may be constitutive (driven by any of a variety of promoters, including but not limited to, CMV, SV40, RSV, actin, EF) or inducible (driven by any of a number of inducible promoters including, but not limited to, tetracycline, ecdysone, steroid-responsive). The expression vector must be replicable in the host organisms either as an episome or by integration into host chromosomal DNA. In various embodiments, the expression vector may comprise a plasmid, viral-based vector, or any other suitable expression vector.

[0039] In another aspect, the disclosure provides host cells that comprise the nucleic acids, expression vectors (i.e.: episomal or chromosomally integrated), non-naturally occurring polypeptides, fusion protein, or compositions disclosed herein, wherein the host cells can be either prokaryotic or eukaryotic. The cells can be transiently or stably engineered to incorporate the nucleic acids or expression vector of the disclosure, using techniques including but not limited to bacterial transformations, calcium phosphate co-precipitation, electroporation, or liposome mediated-, DEAE dextran mediated-, polycationic mediated-, or viral mediated transfection.

[0040] In another aspect, the present disclosure provides pharmaceutical compositions, comprising one or more polypeptides, fusion proteins, compositions, nucleic acids, expression vectors, and/or host cells of the disclosure and a pharmaceutically acceptable carrier. The pharmaceutical compositions of the disclosure can be used, for example, in the methods of the disclosure described below. The pharmaceutical composition may comprise in addition to the polypeptide of the disclosure (a) a lyoprotectant; (b) a surfactant; (c) a bulking agent; (d) a tonicity adjusting agent; (e) a stabilizer; (f) a preservative and/or (g) a buffer.

[0041] In another aspect, the disclosure provides uses and methods for use of the polypeptides, fusion proteins, scaffolds, nucleic acids, expression vectors, host cells, and/or pharmaceutical compositions of the disclosure for any suitable use as disclosed herein. In one non-limiting embodiment, the polypeptides, fusion proteins, scaffolds, nucleic acids, expression vectors, host cells, and/or pharmaceutical compositions are used as a targeting moiety, to direct a “payload” to the target to which the polypeptide binds. In one embodiment, the payload may be a functional domain as described herein, and the polypeptide may be provided as a fusion protein with a polypeptide functional domain. The payload may include, but is not limited to, a detectable moiety (fluorescent protein, luminescent compound or protein, radioactive isotope, etc.), a therapeutic functional domain, and/or a diagnostic functional domain.

[0042] In another non-limiting embodiment, the polypeptides, fusion proteins, scaffolds, nucleic acids, expression vectors, host cells, and/or pharmaceutical compositions are used as a therapeutic moiety. In non-limiting embodiments, the methods may comprise treating a tumor or infection, such as a viral infection. The protein targets fall into two classes: (1) human cell surface or extracellular proteins involved in signaling, for which binders have utility as therapeutics for treating a tumor (Tropomyosin receptor kinase A (TrkA)15, Fibroblast growth factor receptor 2 (FGFR2)16, Epidermal growth factor receptor (EGFR)17, Platelet-derived growth factor receptor (PDGFR)18, Insulin receptor (Insulin®)19, Insulin-like growth factor 1 receptor (IGFIR)20, Angiopoietin-1 receptor (Tie2)21, Interleukin-7 receptor alpha (IL-7Rα)22, CD3 delta chain (CD3δ)23, Transforming growth factor beta (TGF-β)24); and (2) pathogen surface proteins for which binding proteins have therapeutic utility in treating infections (Influenza A H3 hemagglutinin (H3)25 (H3_mb series of proteins disclosed herein), VirB8-like protein from Rickettsia typhi (VirB8)26, and the SARS-CoV-2 coronavirus spike protein (LCB series of proteins).

[0043] As used herein, “treat” or “treating” means accomplishing one or more of the following: (a) reducing the severity of the disorder; (b) limiting or preventing development of symptoms characteristic of the disorder(s) being treated; (c) inhibiting worsening of symptoms characteristic of the disorder(s) being treated; (d) limiting or preventing recurrence of the disorder(s) in patients that have previously had the disorder(s); and (e) limiting or preventing recurrence of symptoms in patients that were previously symptomatic for the disorder(s).

[0044] The subject may be any subject that has a relevant disorder. In one embodiment, the subject is a mammal, including but not limited to humans, dogs, cats, horses, cattle, etc. In one embodiment, the subject is a human subject.

[0045] In another aspect, the disclosure provides methods for designing protein binding proteins from target structural information alone comprising any steps or combination of steps as described in the examples that follow.

### EXAMPLES

### Abstract

[0046] The design of proteins that bind to a specific site on the surface of a target protein using no information other than the three-dimensional structure of the target remains an outstanding challenge. We describe a general solution to this problem, which starts with a broad exploration of the very large space of possible binding modes and interactions, and then intensifies the search in the most promising regions. We demonstrate its very broad applicability by de novo design of binding proteins to 12 diverse protein targets with very different shapes and surface properties. Biophysical characterization shows that the binders, which are all smaller than 65 amino acids, are hyperstable and bind their targets with nanomolar to picomolar affinities. Crystal structures of four of the binder-target complexes were solved, and all four are very close to the corresponding computational design models (data not shown). Experimental data on nearly half a million computational designs and hundreds of thousands of point mutants provide detailed feedback on the strengths and limitations of the method and of our current understanding of protein-protein interactions, and should guide improvement of both. Our approach now enables targeted design of binders to sites of interest on a wide variety of proteins for therapeutic and diagnostic applications.

### Design Method

[0047] We sought to develop a general approach to design of high affinity binders to arbitrary protein targets that addresses two major challenges. First, in the general case, there are no clear sidechain interactions or secondary structure packing arrangements that can mediate strong interactions with the target; instead there are a very large number of individually very weak possible interactions. Second, the number of ways of choosing from these numerous weak interactions to incorporate into a single binding protein is combinatorially large, and any given protein backbone is unlikely to be able to simultaneously present sidechains that can encompass any preselected subset of these interactions. To motivate our approach, consider the simple analogy of a very difficult climbing wall with only a few good footholds or handholds distant from each other. Previous “hotspot” based approaches correspond to focusing on routes involving these footholds/handholds, but this greatly limits the possibilities and there may be no way to connect them into a successful route. An alternative is to first, identify all possible handholds and footholds, no matter how poor, second, have thousands of climbers select subsets of these, and try to climb the wall, third, identify those routes that were most promising, and fourth, have a second group of climbers explore them in detail. Following this analogy, we devised a multi-step approach to overcome the above two challenges by 1) enumerating a large and comprehensive set of disembodied sidechain interactions with the target surface, 2) identifying from large in silico libraries of protein backbones those that can host many of these sidechains without clashing with the target, 3) identifying recurrent backbone motifs in these structures, and 4) generating and placing against the target a second round of scaffolds containing these interacting motifs (FIG. 1a). Steps 1 and 2 search the space very widely, while steps 3 and 4 intensify search in the most promising regions. We describe and motivate each step in the following paragraphs.

[0048] We began by docking disembodied amino acids against the target protein, and storing the backbone coordinates and target binding energies of the typically billions of amino acids making favorable hydrogen bonding or non-polar interactions in a 6-dimensional spatial hash table for rapid lookup (FIG. 1a; see methods). This “rotamer interaction field” (RIF) enables rapid approximation of the target interaction energy achievable by a protein scaffold docked against a target based on its backbone coordinates alone (with no need for time consuming sidechain sampling)—for each dock, the target interaction energies of each of the matching amino acids in the hash table are summed. A related approach was used for small molecule binder design{Dou, 2018 #7}; since protein targets are so much bigger, and non-polar interactions are the primary driving force for protein-protein association, we focused the RIF generation process on non-polar sites in specific surface regions of interest: for example in the case of inhibitor design, interaction sites with biological partners. The RIF approach improves upon previous discrete interaction-sampling approaches {Fleishman, 2011 #3} by reducing algorithmic complexity from O(N) or O(N²) to O(1) with respect to the number of sidechain-target interactions considered, allowing for billions, rather than thousands, of potential interfaces to be considered.

[0049] For docking against the rotamer interaction field, it is desirable to have a very large set of protein scaffold options, as the chance that any one scaffold can house many interactions is small. The structure models of these scaffolds must be quite accurate so that the positioning is correct. Using fragment assembly {Koga, 2012 #14}, piecewise fragment assembly {Linsky, 2021 #16}, and helical extension {Maguire, 2021 #15}, we designed a large set of miniproteins ranging in length from 50 to 65 amino acids containing larger hydrophobic cores than previous miniprotein scaffold libraries {Chevalier, 2017 #1}, which makes the protein more stable and more tolerant to introduction of the designed binding surfaces. 84,690 scaffolds spanning 5 different topologies with structural metrics predictive of folding were encoded in large oligonucleotide arrays and 34,507 were found to be stable using a high-throughput proteolysis based protein stability assay {Rocklin, 2017 #8}. We experimented with several approaches for docking these stable scaffolds against the target structure rotamer interaction field, balancing overall shape complementarity with maximizing specific rotamer interactions. The most robust results were obtained using direct low resolution shape matching {Schneidman-Duhovny, 2005 #9} followed by grid based refinement of the rigid body orientation in the RIF (RIFDock™). This resulted in better Rosetta™ binding energies (ddGs) and packing after sequence design (contact molecular surface, see below) than shape matching alone with PatchDock™ (FIG. 1b), and more extensive non polar interaction with the target than hierarchical search without PatchDock™ shape matching {Dou, 2018 #7}.

[0050] Because of the loss in resolution in the hashing used to build the RIF, and the necessarily approximate accounting for interactions between sidechains (see methods), we found that evaluation of the RIF solutions is considerably enhanced by full combinatorial optimization using the Rosetta™ forcefield, allowing the target sidechains to repack and the scaffold backbone to relax. Full combinatorial sequence optimization is quite CPU intensive, however, and to enable rapid screening through millions of alternative backbone placements, we developed a rapid pre-screening method using Rosetta™ to identify promising RIF docks. We found that including only hydrophobic amino acids, using a reduced set of rotamers than in standard Rosetta™ design calculations, and a more rapidly computable energy function sped design more than 10-fold while retaining a strong correlation with results after full sequence design (next paragraph); this pre-screen (referred to as the “Predictor” below) substantially improved the binding energies and shape complementarity of the final designs as far more RIF solutions could be processed.

[0051] We observed that application of standard Rosetta™ design to the set of filtered docks in some cases resulted in models with buried unsatisfied polar groups and other suboptimal properties. To overcome these limitations, we developed a combinatorial sequence design protocol that maximizes shape and chemical complementarity with the target while avoiding buried polar atoms. Sequence compatibility with the scaffold monomer structure was increased using a structure based sequence profile (Brunette, 2020 #17), the cross-interface interactions were upweighted during the Monte Carlo-based sequence design stage to maximize the contacts between the binder and the target (see method for the ProteinProteinInterfaceUpweighter), and rotamers containing buried unsatisfiable polar atoms were eliminated prior to packing and buried unsatisfied polar atoms penalized by a pair-wise decomposable pseudo-energy term {Coventry, 2021 #18}. This protocol yielded amino acid sequences more strongly predicted to fold to the designed structure and to bind the target than standard Rosetta™ interface design.

[0052] In the course of developing the overall binder design pipeline, we noticed upon inspection that even designs with favorable Rosetta™ binding free energies, large changes in Solvent Accessible Surface Area (SASA) upon binding, and high shape complementarity (SC) often lacked dense packing and interactions involving several secondary structural elements. We developed a quantitative measure of packing quality in much closer accord with visual assessment—the contact molecular surface (see methods)—which balances interface complementarity and size in a manner that explicitly penalizes poor packing. We used this metric to help select designs at both the rapid Predictor stage and after full sequence optimization (see Methods).

[0053] The space sampled by the search over structure and sequence space is enormous: tens of thousands of possible protein backbones×nearly one billion possible disembodied sidechain interactions with target×10¹⁶ interface sequences per scaffold placement. Sampling of spaces of this size is necessarily incomplete, and many of the designs at this stage contained buried unsatisfied polar atoms (only rotamers that cannot make hydrogen bonds in any context are excluded at the packing stage) and cavities. To generate improved designs, we intensified the search around the best of the designed interfaces. We developed a resampling protocol which first extracts all the secondary structural motifs making good contacts with the target protein from the first “broad search” designs, clusters these motifs based on their backbone coordinates and rigid body placements, and then selects the binding motif in each cluster with the best per-position weighted Rosetta™ binding energy; around 2,000 motifs were selected for each target. These motifs, which are privileged because they contain a much greater density of favorable side chain interactions with the target than the rest of the designs, were then used to guide another round of docking and design. Scaffolds from the library were superimposed on the privileged motifs, the favorable-interacting motif residues transferred to the scaffold, and the remainder of the scaffold sequence optimized to make further interactions with the target, allowing backbone flexibility to increase shape complementarity with the target (FIG. 1a). Interface metrics for the designs based on the resampling protocol were considerably improved relative to those of the designs from the broad searching stage (FIG. 1b). The designs with the most favorable protein folding and protein interface metrics from both the broad searching and resampling stages were selected for experimental validation.

### Experimental Testing

[0054] Previous protein binder design approaches have been tested on only one or two targets, which limits assessment of their generality. To robustly test our new binder design pipeline, we selected thirteen native proteins of considerable current interest spanning a wide range of shapes and biological functions. These proteins fall into two classes: first, human cell surface or extracellular proteins involved in signaling, for which binders could have utility as probes of biological mechanism and potentially as therapeutics (Tropomyosin receptor kinase A (TrkA) {Wiesmann, 1999 #30}, Fibroblast growth factor receptor 2 (FGFR2) {Plotnikov, 2000 #31}. Epidermal growth factor receptor (EGFR) {Garrett, 2002 #21}, Platelet-derived growth factor receptor (PDGFR) {Shim, 2010 #22}. Insulin receptor (Insulin®) {Croll, 2016 #23}, Insulin-like growth factor 1 receptor (IGF1R) {Xu, 2018 #24}, Angiopoietin-1 receptor (Tie2) {Barton, 2006 #25}, Interleukin-7 receptor alpha (IL-7Rα) {McElroy, 2009 #26}, CD3 delta chain (CD38) {Amett, 2004 #27}, Transforming growth factor beta (TGF-β) {Radaev, 2010 #28}); and second, pathogen surface proteins for which binding proteins could have therapeutic utility (Influenza A H3 hemagglutinin (H3) {Ekiert, 2012 #20}, VirB8-like protein from Rickettsia typhi (VirB8) {Gillespie, 2015 #29}, and the SARS-CoV-2 coronavirus spike protein) (FIG. 2a). For each target, we selected one or two regions to direct binders against for maximal biological utility and for potential downstream therapeutic potential. These regions span a wide range of surface properties, with diverse shape and chemical characteristics (FIG. 2a).

[0055] Using the above protocol, we designed 15,000-100,000 binders for each of thirteen target sites on the twelve native proteins (see Methods; we chose two sites on the EGF receptor). Synthetic oligonucleotides (230 bp) encoding the 50-65 residue designs were cloned into a yeast surface expression vector, the designs were displayed on the surface of yeast, and those which bind their target enriched by several rounds of fluorescence-activated cell sorting using fluorescently labelled target proteins. The starting and enriched populations were deep sequenced, and the fraction of each design after each sort was determined by comparing the frequency of the design in the parent and child pools. From multiple sorts at different target protein concentrations, we determined, as a proxy for binding Kd's, the midpoint concentration (SC₅₀) in the binding transitions for each design in the library (Table 14 and Methods).

TABLE 14
Number of binders against the 12 targets as estimated from FACS
sorting. SC₅₀ (Sorting Concentration₅₀) refers to the target concentration
where 50% of expressing yeast cells for a given design are collected.
The “SC₅₀ < 4 μM” column was produced by looking
for binders that saw >20% collection frequency during a 1 μM w/o
avidity sort (see Method). When a 1 μM sort was not performed,
500 nM and 11% were used instead. A similar procedure was used
to estimate the 400 nM column. Some binders saturate their binding
signal at 20% collection frequency (likely expression problems),
for this reason, the H3 data were estimated at 800 nM to avoid
needing a threshold higher than 20%. Additionally, binders with
very low counts were discarded to guard against doubly-transformed
yeast (See Methods).

| | | | Total Designs |
|---|---|---|---|
| Target | SC₅₀ < 4 μM | SC₅₀ < 400 nM | Tested |
| H3 | 50 (0.08%) | 21* (0.04%) | 60000 |
| TrkA | 10 (0.07%) | 3 (0.02%) | 15000 |
| FGFR2 | 604 (1.00%) | 196 (0.33%) | 60000 |
| EGFR | 15 (0.01%) | 12 (0.01%) | 100000 |
| PDGFR | 284 (0.28%) | 0 (0.00%) | 100000 |
| InsulinR | 259 (0.43%) | 2 (0.00%) | 60000 |
| IGF1R | 45 (0.30%) | 1 (0.01%) | 15000 |
| Tie2 | 5 (0.01%) | 0 (0.00%) | 100000 |
| IL-7Rα | 22 (0.14%) | 7 (0.05%) | 15000 |
| CD3^{a} | 1 (0.00%) | 0 (0.00%) | 60000 |
| TGF-β | 100 (0.67%) | 12 (0.08%) | 15000 |
| VirB8 | 72 (0.48%) | 10 (0.07%) | 15000 |
| SARS-Cov-2 RBD | 18 (0.02%) | 9 (0.01%) | 100000 |

*Number of binders with SC₅₀ < 800 nM estimated from 200 nM sort.
^{a}SSM sorts used to estimate the number of binders.

[0056] To assess whether the top enriched designs for each target fold and bind as in the corresponding computational design models, and to investigate the sequence dependence of folding and binding, we generated high resolution footprints of the binding surface by sorting site saturation mutagenesis libraries (SSMs) in which every residue was substituted with each of the 20 amino acids one at a time. For the majority, but not all, enriched designs, substitutions at the binding interface and in the protein core were less tolerated than substitutions at non-interface surface positions (FIG. 2b), and all the cysteines were highly conserved in designs containing disulfides. The effects of each mutation on both binding energy and monomer stability were estimated using Rosetta™ design calculations, and a reasonable correlation was found between the predicted and experimentally determined effect of mutations (FIG. 4). In almost all cases, a small number of substitutions were found to increase apparent binding affinity, and we generated libraries combining 5-15 of these combinatorially and sorted for binding under increasingly stringent (lower target concentrations) conditions. Many of these affinity-enhancing substitutions were mutations to tyrosine (FIG. 5), consistent with the high relative frequency of tyrosine in natural protein interfaces{Birtalan, 2008 #42}. The set of affinity increasing substitutions provide valuable information for improving the approach as these substitutions ideally would have been identified in the computational sequence design calculations (see discussion below).

[0057] We expressed the highest affinity combinatorially-optimized binders for each target in E. coli for more detailed structural and functional characterization. All of the designs were in the soluble fraction, and could be readily purified by nickel-NTA chromatography. All had circular dichroism spectra consistent with the design model, and most (9 out of 13) were stable at 95° C. (FIG. 2d). The binding affinities for the targets were assessed by biolayer interferometry, and found to range from 300 μM to 900 nM (FIG. 2c and Table 15). The sequence mapping data report on the residues on the design critical for binding, but only weakly on the region of the target bound. We investigated this using a combination of binding competition experiments, biological assays, and structural characterization of the complexes. For the nine targets for which these were available, this characterization suggested binding modes consistent with the design models, as described in the following paragraphs.

TABLE 15
Topologies, initial amino acid sequences, final optimized amino acid sequences
and physicochemical properties of the de novo miniprotein binders for all 12 targets.

| | | | Original | Optimized | # | Octet | |
|---|---|---|---|---|---|---|---|
| Target | Binder | Topology | sequence | sequence | mutations | kD | TM |
| H3 | H3_mb | HHH | SEREEFLEWLLR | SQHEKFLEWMLR | 8 | 320 nM | >95° C. |
| | | | KIEEAIKRGNKI | KIEEAIKRGNKI | | | |
| | | | SAEFLIGLAKQF | SAEFLINLAKNF | | | |
| | | | LHVINDDEIRRR | IHVLGDDEIRRR | | | |
| | | | LERLERLLH | LERLERQLH | | | |
| | | | (SEQ ID NO: | (SEQ ID | | | |
| | | | 644) | NO: 645) | | | |
| TrkA | TrkA_mb | HHH | RDELKERIEKTI | RDEIKERIFKAV | 12 | 1.4 nM | >95° C. |
| | | | VRAVVTGDPELL | VRAIVTGNPEQL | | | |
| | | | KEAKKLLEKLKK | KEAKKLLEKLKK | | | |
| | | | LGRLDQSAKQLE | LGRLDQDAKKFE | | | |
| | | | KAVREVEKQLRS | KAIRQVEKRLRS | | | |
| | | | (SEQ ID | (SEQ ID | | | |
| | | | NO: 1456) | NO: 1457) | | | |
| FGER2 | FGFR2_mb | HHH | DPSKELDKVYRT | DRRKEMDKVYRT | 12 | 543 pM | 71.1 ºC |
| | | | AFKRITSIPDKE | AFKRITSTPDKE | | | |
| | | | KQKEVVKEATEL | KRKEVVKEATEQ | | | |
| | | | LRRIAKDEEEKK | LRRIAKDEEEKK | | | |
| | | | LASLISLELKTL | KAAYMILFLKTL | | | |
| | | | S (SEQ ID | G (SEQ ID | | | |
| | | | NO: 22) | NO: 144) | | | |
| EGER | EGFRn_mb | HHH | DHWEEVERWALE | DHWEEVERWALE | 5 | 1.7 nM | >95° C. |
| | | | LLQEATEQNDPT | HLQEATQQNDPQ | | | |
| | | | KAKKILEEAHKL | KAKKILEEAHKW | | | |
| | | | LRRELSEEEARA | LRRELSEEEARA | | | |
| | | | VVRYLKQLVDRE | VVRWLKQLVDRE | | | |
| | | | LS (SEQ ID | LS (SEQ ID | | | |
| | | | NO: 6) | NO: 143) | | | |
| EGER | EGFRc_mb | HHH | SPDEAKKLLQEA | SLDEAKKLLQEA | 10 | 6.8 nM | 71.2° C. |
| | | | EKLARKQNDRME | EKLARKLNDRME | | | |
| | | | LAYVEFLKHVLE | LAYVEFLKHILE | | | |
| | | | NAKRINDKRAVE | TAKKQNDKRTIE | | | |
| | | | SVRELARDALEE | SVRDMARDALEE | | | |
| | | | LQS (SEQ ID | LQS (SEQ ID | | | |
| | | | NO: 3) | NO: 142) | | | |
| PDGFR | PDGFR_mb | HEEHE | DDERLARLAFRV | DDERLATLAFRA | 7 | 53 nM | >95° C. |
| | | | LIKRAGVPDFDV | LIKRAGVKNLDV | | | |
| | | | KVTNGKVRVTIT | KVTNGKVRVTIT | | | |
| | | | GRDQASQEALQL | GRDQASFKALQL | | | |
| | | | VEALARREGLQV | VFALARRLGLQV | | | |
| | | | QIDTR | QIDTR | | | |
| | | | (SEQ ID NO: | (SEQ ID | | | |
| | | | MMG) | NO: 1056) | | | |
| Insulin | Insulin | HHHH | DEELLELVYEAV | DEELMELVYEAV | 10 | 270 nM | 65 °C. |
| R | Rmb | | EKNDPRLLFEAW | EKNDPELLFEAW | | | |
| | | | MILASLLDKTGD | MELASLLDETGD | | | |
| | | | PKIEELLRLLQL | PKIEEALGLLQQ | | | |
| | | | VDRGDPDARRRI | VDGGNPDAGRRI | | | |
| | | | KELEK (SEQ | KELFK (SEQ | | | |
| | | | ID NO: 788) | ID NO: 789) | | | |
| IGF1R | IGF1R_mb | HHH | STRNAEFIVLLA | STRNAEFIMLLL | 11 | 860 nM | >95° C. |
| | | | ELCAKSQNDPSL | ELCVKSKNDPQV | | | |
| | | | QEYVKKVKKIVE | QEYVKKVKKQVE | | | |
| | | | SLLSNGDEKSAE | RLVGNGDEKKAE | | | |
| | | | EVARKALEYCAD | EVARKALEYCAD | | | |
| | | | G (SEQ ID | G (SEQ ID | | | |
| | | | NO: 712) | NO: 713) | | | |
| Tie2 | Tie2_mb | HHHH | SLVEELERLLEE | SIDEELERLLEE | 11 | 584 nM | >95° C. |
| | | | AGVDPELIEKLS | AGVDPELIDDLY | | | |
| | | | AVILQLLIRGLD | AVIYQLYIRGLS | | | |
| | | | PKDVLRFLLEML | DKDVLRELLENL | | | |
| | | | ERDGNPLRRVVE | ERDGTPLRRVVE | | | |
| | | | ELLKR (SEQ | ELLKR (SEQ | | | |
| | | | ID NO: 1450) | ID NO: 1451) | | | |
| IL-7Rα | IL- | HHH | SVKKKVRKVEKK | SVIEKERKLEKQ | 13 | 312 pM | >95° C. |
| | 7Rα_mb | | ARKAGDELAVLL | ARKQGDEVLVML | | | |
| | | | ARRVLEALEKGL | ARMVLEYLEKGW | | | |
| | | | VSEEDADESADR | VSEEDADESADR | | | |
| | | | IEEALKK (SEQ | IEEVLKK (SEQ | | | |
| | | | ID NO: 760) | ID NO: 761) | | | |
| CD3δ | CD3δ_mb | EHEEHE | NHIACEIHNPEA | NHIACEIHNPEA | 5 | 612 nM | >95° C. |
| | | | AKEIAKVANVRR | AKEIAKVANVRR | | | |
| | | | VFVIKQPGNRYF | VYFIKQPGNRYF | | | |
| | | | VLLKDADPEGVK | VLLKNADPEGVK | | | |
| | | | KVASKYNARCVI | KVRSKYNVRCVI | | | |
| | | | RE (SEQ ID | RE (SEQ ID | | | |
| | | | NO: 1) | NO: 141) | | | |
| TGF-β | TGF-β_mb | EHEEHE | TCTIEVVGVDPE | HCTIEVVGVDPE | 10 | 270 nM | >95° C. |
| | | | AVEAIAAAFGAE | KVEAIAAAYGAE | | | |
| | | | VREKDGKLEIHL | VCEKDGKFEIHL | | | |
| | | | DDPHGAESAAAA | DDPHSAESAAVA | | | |
| | | | ISVLANVRVRLQ | ISVLINRPVRLQ | | | |
| | | | C (SEQ ID | C (SEQ ID | | | |
| | | | NO: 1346) | NO: 1347) | | | |
| VirB8 | VirB8_mb | HHH | NAEEILEKATLI | NAEEITEKATLV | 14 | 500 pM | 66.2 |
| | | | AIEAWMLAKDEE | GIEAWLLAKDEE | | | |
| | | | VKKLVRTLARQV | QKKKVRTLNRQV | | | |
| | | | RKLLSNNDDDSA | KKLLQQNDLDQA | | | |
| | | | KSVLDTLKSVLE | KRVLDQLKSVLE | | | |
| | | | DLKS (SEQ ID | DLKS (SEQ ID | | | |
| | | | NO: 1467) | NO: 1468) | | | |

### Host Protein Targets Involved in Signaling

[0058] The receptor tyrosine kinases TrkA, FGFR2, PDGFR. EGFR, InsulinR. IGF1R and Tie2 are key regulators of cellular processes and are involved in the development and progression of many types of cancer{Lemmon, 2010 #32}. We designed binders targeting the native ligand binding sites for PDGFR, EGFR (on both domain I and domain III, the binders are then referred as EGFRn_mb and EGFRc_mb respectively), InsulinR. IGFIR and Tie2, and targeting surface regions proximal to the native ligand binding sites for TrkA and FGFR2 (FIG. 2a and see methods for criteria). We obtained binders to all eight targeting sites; the binding affinities of the optimized designs ranged from −1 nM or better for TrkA and FGFR2, to 860 nM for IGFIR. Competition experiments with nerve growth factor (NGF), Platelet Derived Growth Factor-BB (PDGF-BB), insulin, insulin growth factor-1 (IGF-1) and Angiopoietin 1 (Ang1) on yeast suggest that the binders for TrkA, PDGFR, InsulinR, IGF1R and Tie2 bind to their targeted sites (FIG. 6), and hence that the binding mode is consistent with the computational design models. The receptor tyrosine kinase binders as monomers are all expected to be antagonists. The effect of signaling through TrkA, FGFR2 and EGFR of the cognate binders on cells in culture was tested, and strong inhibition of signaling by the native agonists was observed in all three cases (Data not shown), including picomolar affinity binder for IL-7Rα targeting the IL-7 binding site.

### Pathogen Target Proteins

[0059] Hemagglutinin (HA) is the main target for influenza A virus vaccine and drug development, and it can be genetically classified into two main subgroups, group 1 and group 2{Webster, 1992 #83; Nobusawa, 1991 #84}. The HA stem region is an attractive therapeutic epitope, as it is highly conserved across all the influenza A subtypes and targeting this region can block the low pH-induced conformational rearrangements associated with membrane fusion, which is vital to the virus infection {Bullough, 1994 #85; Ekiert, 2009 #82}. Protein {Fleishman, 2011 #3; Chevalier, 2017 #1}, peptide {Kadam, 2017 #33} and small molecule inhibitors {van Dongen, 2019 #34} have been designed to bind to the stem region of group 1 HA to neutralize the influenza A viruses, but none of them is able to recognize the group 2 HA. Neutralizing antibodies targeting the stem region of group 2 HA have been identified through screening of large B-cell libraries after vaccination or infection, and some of them showed broad specificity and neutralized both group 1 and group 2 influenza A viruses {Corti, 2011 #35; Joyce, 2016 #86}. However, rational design of group 2 HA stem region binders remains a longstanding challenge, let alone the de novo designed pan-specific HA stem region binders which can bind both group 1 HA and group 2 HA. The challenge is mainly due to three differences between the group 1 HA and the group 2 HA: the group 2 HA stem region contains more polar residues and is more hydrophilic; in group 2 HA, Trp21 adopts a configuration roughly perpendicular to the surface of the targeting groove, which makes the targeting groove much shallower and less hydrophobic; the group 2 HA is glycosylated at Asn38, and the carbohydrate side chains covers the hydrophobic groove and protected the HA stem region from binding by antibodies or designed binders. We applied our new method to design binders to H3 HA (A/Hong Kong/1/1968), the main pandemic subtype of group 2 influenza virus, and obtained a binder with an affinity of 320 nM to the wild type H3 (FIG. 2) and 28 nM to the deglycosylated H3 variant (N38D) (FIG. 7a); the reduction in affinity is likely due to the entropy loss of the glycan upon binding and/or the steric clash with the glycan. The binder also binds to H1 HA (A/Puerto Rico/8/1934) which belongs to the main pandemic subtype of group 1 influenza virus (FIG. 7b); the binding with both H1 and H3 is competed by the stem region binding neutralizing antibody FI6v3{Corti, 2011 #35} on the yeast surface (FIG. 7c,d), suggesting that the binder binds the hemagglutinin at the targeted site. We also designed binders to the prokaryotic pathogen protein VirB8 which belongs to the type IV secretion system of Rickettsia typhi, which is the causative agent of murine typhus {Gillespie, 2015 #29}. We selected the surface region composed of the second and the third helices of VirB8, and obtained binders with 500 pM affinity (FIG. 2).

[0060] With the outbreak of the SARS-CoV-2 coronavirus pandemic we applied our method to design miniproteins targeting the receptor binding domain of the SARS-CoV-2 Spike protein near the ACE2 binding site to block receptor engagement. Due to the pressing need for coronavirus therapeutics, we recently described the results of these efforts {Cao, 2020 #2} ahead of those described in this manuscript; As in the case of FGFR2, IL-7Rα and VirB8, the method yielded picomolar binders, which are among the most potent compounds known to inhibit the virus in cell culture (IC₅₀ 0.15 ng/ml) and subsequent animal experiments have shown that they provide potent protection against the virus in vivo {Case, 2021 #43}. The modular nature of the miniprotein binders enables their rapid integration into designed diagnostic biosensors which we have demonstrated for both influenza and SARS-CoV-2 binders {Quijano-Rubio, 2021 #69}.

[0061] The designed binding proteins are all very small proteins (<65 amino acids), and many are 3-helix bundles. To evaluate their target specificity, we tested the highest affinity binder to each target for binding to all other targets. There was very little cross reactivity (FIG. 3a), likely due to the diverse surface shape and electrostatic properties of the designed binders (FIG. 3b). Consistent with previous observations with affibodies {Frejd, 2017 #10}, this suggests that a wide variety of binding specificities can be encoded in simple helical bundles; in our approach, scaffolds are customized for each target, so the specificity arises both from the set of sidechains at the binding interface, and the overall shape of the interface itself. To probe the dependence of scaffold design accuracy on design success, large numbers of scaffolds were superimposed onto 11 interface helical binding motifs for the IL-7Rα target, and sequence design was carried out as described above. There was a strong correlation between the extent of binding and the RMSD to the binding motif, suggesting that designed backbones must be quite accurate to achieve binding.

[0062] Structural validation There is a clear reorientation of the oligosaccharide at Asn38 compared with the unbound HK68/H3 structure, which has been seen in HK68/H3 structures bound with stem region neutralizing antibodies {Corti, 2011 #35; Joyce, 2016 #86}, and this explains the different binding affinities of the H3 binder with the wild type H3 HA (A/Hong Kong/1/1968) and the deglycosylated H3 variant (N38D) in the BLI assay (FIG. 2 and FIG. 7). High resolution sequence footprinting (FIG. 2b & Table 16) and competition results suggest that the interfaces involve both the designed residues and the intended regions on the target. The very close agreement between the experimentally determined structures and the original design models suggests that the substitutions required to achieve high affinity play relatively subtle roles in tuning interface energetics; the overall structure of the complex, including the structure of the monomer binders and the detailed target binding mode, are determined by the computational design procedure.

TABLE 16
SSM Fingerprint Scores. Shown here are the SSM fingerprint scores
for the 12 characterized binders as well as the 2 Cryo-EM verified
SARS-CoV-2 binders. Using LCB1's P-Entropy column as the reference
for verification, all but CD3δ_mb and IGF1R_mb pass this
validation metric in both columns. Values in red are below the threshold
p-value of 0.005. Possible explanations for the failures are that
the IGF1R design model was lost (user error) and had to be
reconstructed via prediction. The CD3δ binder is weak and the
target protein is sticky. K/O mutations may still be able to
bind via alternate binding configurations

| Binder | P-Rosetta ™ | P-Entropy |
|---|---|---|
| H3_mb | 1e−16 | 5e−62 |
| TrkA_mb | 6e−08 | 6e−14 |
| FGFR2_mb | 2e−08 | 5e−05 |
| EGFRn_mb | 4e−17 | 1e−31 |
| EGFRc_mb | 4e−12 | 3e−08 |
| PDGFR_mb | 5e−10 | 3e−04 |
| InsulinR_mb | 9e−07 | 7e−13 |
| IGF1R_mb | 7e−01 | 6e−22 |
| Tie2_mb | 3e−03 | 4e−11 |
| IL-7Rα_mb | 4e−16 | 2e−10 |
| CD3δ_mb | 1e−01 | 5e−02 |
| TGF-β_mb | 2e−04 | 6e−05 |
| VirB8_mb | 1e−24 | 2e−36 |
| LCB1 | 2e−03 | 5e−03 |
| LCB3 | 5e−04 | 3e−21 |

### Conclusions

[0063] Our de novo binder design method and the large data set (810,000 binder designs and 240,000 single mutants) generated here provide a starting point for investigating the fundamental physical chemistry of protein-protein interactions, and for developing and assessing computational models of protein-protein interactions. Across all targets, there was a strong correlation between success rate and the hydrophobicity of the targeted region (FIG. 8), and designs observed experimentally to bind their targets tended to have stronger predicted binding energy, and larger contact molecular surfaces. As found previously for design of protein stability {Rocklin, 2017 #8}, iterative design-build-test cycles in which the design method is updated at each iteration to incorporate feedback from the previous design round should lead to systematic improvement in the design methodology and success rate.

[0064] Our success in designing nM affinity binders for 14 target sites demonstrates that binding proteins can be designed de novo using only information on the structure of the target protein, without need for prior information on binding hotspots or fragments from structures of complexes with binding partners. The success also suggests that our design pipeline provides a quite general solution to the de novo protein interface design problem that goes far beyond previously described methods. This work is a major step forward towards the longer range goal of direct computational design of high affinity binders starting from structural information alone. We expect the binders created here, and new ones created with the method moving forward, will find wide utility as signaling pathway antagonists as monomeric proteins and as tunable agonists when rigidly scaffolded in multimeric formats, and in diagnostics and therapeutics for pathogenic disease. More generally, the ability to rapidly and robustly design high affinity binders to arbitrary protein targets could transform the many areas of biotechnology and medicine that rely on affinity reagents.

### Methods

### Broad Search Stage

[0065] The crystal structures of HA (PDB: 4FNK) {Ekiert, 2012 #20}, EGFR (PDB: 1MOX, 4UV7) {Garrett, 2002 #21; Lim, 2016 #36}, PDGFR (PDB: 3MJG) {Shim, 2010 #22}, IR (PDB: 4ZXB) {Croll, 2016 #23}, IGFIR (PDB: 5U8R) {Xu, 2018 #24}, Tie2 (PDB: 2GY7) {Barton, 2006 #25}, IL-7Rα (PDB: 3DI3) {McElroy, 2009 #26}, CD3 (PDB: 1XIW) {Arnett, 2004 #27}, TGF-β (PDB: 3KFD) {Radaev, 2010 #28} and VirB8 (PDB: 403V) {Gillespie, 2015 #29} were refined in the Rosetta™ energy field constrained by experimental diffraction data. The crystal structures of TrkA (PDB: 1WWW) {Wiesmann, 1999 #30} and FGFR2 (PDB: 1EV2) {Plotnikov, 2000 #31} were refined with the Rosetta™ FastRelax protocol with coordinate constraints. The targeting chain or the selected targeting region were extracted and used as the starting point for docking and design. To run PatchDock™ {Schneidman-Duhovny, 2005 #9}, the scaffolds were mutated to poly-valine first and default parameters were used to generate the raw docks. Rifdock™ was used to generate the rotamer interacting field by docking billions of individual disembodied amino acids to the selected targeting regions {Dou, 2018 #7}. In detail, hydrophobic sidechain R-groups are docked against the target using a branch-and-bound search to quickly identify favorable interactions with the target, and polar sidechain R-groups are enumeratively sampled around every target bond donor or acceptor. To identify backbone placements from which these interactions can be made, side chain rotamer conformations are grown backwards for all R-group placements, and their backbone coordinates stored in a 6-dimensional spatial hash table for rapid lookup. For the hierarchical searching protocol, the miniprotein scaffold library (50-65 residues in length) was docked into the field of the inverse rotamers using a branch-and-bound searching algorithm from low resolution spatial grids to high resolution spatial grids. For the PatchDock™+Rifdock™ protocols, the PatchDock™ outputs were used as seeds for the initial positioning of the scaffolds and the docks were further refined in the finest resolution rotamer interaction field. These docked conformations were further optimized to generate shape and chemically complementary interfaces using the Rosetta™ FastDesign protocol, activating between side-chain rotamer optimization and gradient-descent-based energy minimization. Serval improvements were added to the sequence design protocol to generate better sequences for both folding and binding. These include a better repulsive energy ramping strategy {Maguire, 2021 #15}, upweighting cross-interface energies, a pseudo-energy term penalizing buried unsatisfied polar atoms {Coventry, 2021 #18} and a sequence profile constraint based on native protein fragments {Brunette, 2020 #17}. Computational metrics of the final design models were calculated using Rosetta™, which includes ddg, shape complementary and interface buried solvent accessible surface area, contact molecular surface, etc, for design selection. All the script and flag files to run the programs are in the Supplementary file.

### Focused Search Stage

[0066] The binding energy and interface metrics for all the continuous secondary structure motifs (helix, strand and loop) were calculated for the designs generated in the broad search stage. The motifs with good interaction (based on binding energy and other interface metrics, like SASA, contact molecular surface) with the target were extracted and aligned using the target structure as the reference. All the motifs were then clustered based on an energy based-TMalign™ like clustering algorithm. Briefly, all the motifs were sorted based on the interaction energy with the target, and the lowest energy motif in the unclustered pool was selected as the center of the first cluster. A similar score between this motif and every motif remaining in the unclustered pool was calculated based on the TMalign™ algorithm {Zhang, 2005 #37} without any further superimposition. Those motifs within a threshold similar score (default 0.7) from the current cluster center were removed from the unclustered pool and added to the new cluster. The lowest-energy motif remaining in the unclustered pool was selected as the center of the next cluster, and the second step was repeated. This process continued for subsequent clusters until no motifs remained in the unclustered pool. The best motif from each cluster was then selected based on the per-position weighted Rosetta™ binding energy, using the average energy across all the aligned motifs at each position as the weight. Around 2,000 best motifs were selected and the scaffold library was superimposed onto these motifs using the MotifGraft mover {Silva, 2016 #38}. Interface sequences were future optimized and computational metrics were computed for the final optimized designs as described in the broad search stage. CPU-time requirements to produce 100,000 designed binders to be tested experimentally were typically around 100.000 CPU-hours (usually at least 10× as many binders were computationally designed than were ordered).

### Rapid Rosetta™ Packing Evaluation (the Predictor)

[0067] A severe speed mismatch exists between the docking methods (RifDock™ and Focused search) and the subsequent full sequence design step. While the docking methods can typically produce outputs every 1 to 3 seconds, the full sequence design can take upwards of 4 minutes. To remedy this situation, a step was designed to take about 20 seconds that would be more predictive than metrics evaluated on raw docks, but faster than the full sequence design.

[0068] A stripped down version of the Rosetta™ beta_nov16 score function was used to design only with hydrophobic amino acids. Specifically, fa_elec, lkball[iso,bridge,bridge_unclp], and the_intra_terms were disabled as these proved to be the slowest energy methods by profiling. All that remained were Lennard-Jones, implicit solvation, and backbone-dependent one-body energies (fa_dun, p_aa_pp, rama_prepro). Additionally, flags were used to limit the number of rotamers built at each position (See Supplementary Information).

[0069] After the rapid design step, the designs are minimized twice: once with a low-repulsive score function and again with a normal-repulsive score function. Metrics of interest were then evaluated including like Rosetta™ ddG, Contact Molecular Surface, and Contact Molecular Surface to critical hydrophobic residues.

[0070] Using the fact that these predicted metrics correlate with the values after full sequence design, a Maximum Likelihood Estimator (functional form similar to logistic regression) was used to give each predicted design a likelihood that it should be selected to move forward. A subset of the docks to be evaluated are subjected to the full sequence design, and their final metric values calculated. With a “goal threshold” for each filter, each fully-designed output can be marked as “pass” or “fail” for each metric independently. Then, by binning the fully-designed outputs by their values from the rapid trajectory and plotting the fraction of designs that pass the “goal threshold”, the probability that each predicted design passes each filter can be calculated (sigmoids are fitted to smooth the distribution). From here, the probability of passing each filter may be multiplied together to arrive at the final probability of passing all filters. This final probability can then be used to rank the designs and pick the best designs to move forward to full sequence optimization. The rapid design protocol here is used merely to rank the designs, not to optimize them; the raw, non-rapid-designed docks are the structures carried forward.

### Contact Molecular Surface

[0071] Solvent-accessible surface area (SASA) is a measure of the exposure of amino acids to the solvent and it is typically calculated by methods involving in-silico rolling of a spherical probe, which approximates a water molecule (radius 1.4 Å), around a full-atom protein model. Delta-SASA upon protein-protein binding has been widely used to analyze native protein interactions. Unlike the crystal structures of the native protein complexes, design models for the de novo interactions are usually imperfectly packed, and contain many holes or cavities. If the sizes of the holes or cavities in the interface are smaller than the rolling probe, the SASA can not capture those holes and cavities and the real contacts are usually overestimated by the delta-SASA metric. The contact molecular surface was developed to capture the flaws of the de novo designed interactions. Firstly, the molecule surfaces of the binder and the target were calculated by the triangularization algorithm in the Rosetta™ shape complementary filter. For each triangle, the distance to the closest triangle on the other side was calculated and used to downweight the area of the triangle by the equation: A′=A*exp(−0.5*distance²) Then all the down-weighted areas were summed up to get the contact molecular surface. In this way, the real contacts between the target and the binder are penalized by the cavities and holes in the interface. The contact molecular surface was implemented as the ContactMolecularSurface filter in the Rosetta™ macromolecular modelling suite.

Upweight Protein interface Interactions

[0072] Rosetta™ sequence design starts from generating an interaction graph by calculating the energies between all designable rotamer pairs {Leaver-Fay, 2011 #39}. The best rotamer combinations are searched using a Monte Carlo Simulated Annealing protocol by optimizing the total energy of the protein (monomer/complex). To obtain more contacts between the binder and the target protein, we can upweight the energies of all the cross interface rotamer pairs by a defined factor. In this way, the Monte Carlo protocol will be biased to find solutions with better cross interface interactions. The upweight protein interface interaction protocol was implemented as the ProteinProteinInterfaceUpweighter task operation in the Rosetta™ macromolecular modelling suite.

### DNA Library Preparation

[0073] All protein sequences were padded to 65aa by adding a (GGGS)n (SEQ ID NO: 1574) linker at the C terminal of the designs, to avoid the biased amplification of short DNA fragments during PCR reactions. The protein sequences were reversed translated and optimized using DNAworks2.0 {Hoover, 2002 #1} with the S. cerevisiae codon frequency table. Oligo pool encoding the de novo designs and the point mutant library were ordered from Agilent Technologies. Combinatorial libraries were ordered as IDT (Integrated DNA Technologies) ultramers with the final DNA diversity ranging from 1e6 to 1e7.

[0074] All libraries were amplified using Kapa HiFi Polymerase (Kapa Biosystems) with a qPCR machine (BioRAD CFX96). In detail, the libraries were firstly amplified in a 25 ul reaction, and PCR reaction was terminated when the reaction reached half maximum yield to avoid over amplification. The PCR product was loaded to a DNA agarose gel. The band with the expected size was cut out and DNA fragments were extracted using QlAquick™ kits (Qiagen, Inc.). Then, the DNA product was re-amplified as before to generate enough DNA for yeast transformation. The final PCR product was cleaned up with a QlAquick™ Clean up kit (Qiagen, Inc.). For the yeast transformation, 2-3 μg of linearized modified pETcon™ vector (pETcon3) and 6 μg of insert were transformed into EBY100 yeast strain using the protocol as described in {Benatuil, 2010 #12}.

[0075] DNA libraries for deep sequencing were prepared using the same PCR protocol, except the first step started from yeast plasmid prepared from 5×10⁷ to 1×10⁸ cells by Zymoprep™ (Zymo Research). Illumina adapters and 6-bp pool-specific barcodes were added in the second qPCR step. Gel extraction was used to get the final DNA product for sequencing. All different sorting pools were sequenced using Illumina NextSeq™ sequencing.

### Target Protein Preparation

[0076] Influenza A hemagglutinin (HA) ectodomain was expressed using a baculovirus expression system as described previously {Stevens, 2004 #62; Ekiert, 2012 #63}. Briefly, each HA was fused with gp67 signal peptide at the N-terminus and to a BirA biotinylation site, thrombin cleavage site, trimerization domain and His-tag at the C-terminus. Expressed HAs were purified using metal affinity chromatography using Ni-NTA resin. For binding studies, each HA was biotinylated with BirA and purified by gel filtration using S200 16/90 column on ÄKTA protein purification system (GE Healthcare). The biotinylation reactions contained 100 mM Tris (pH 8.5), 10 mM magnesium acetate, 10 mM ATP, 50 μM biotin and <50 mM NaCl, and were incubated at 37° C. for 1 hr.

[0077] For TrkA, the DNA encoding human TrkA ECD (residues 36-382) was cloned into pAcBAP, a derivative of pAcGP67-A modified to include a C-terminal biotin acceptor peptide (BAP) tag (GLNDIFEAQKIEWHE) (SEQ ID NO:1571) followed by a 6×HIS tag for affinity purification. It was then transfected into Trichoplusia ni (High Five) cells (Invitrogen) using the BaculoGold™ baculovirus expression system (BD Biosciences) for secretion and purified from the clarified supernatant via Ni-NTA followed by size exclusion chromatography with a Superdex™-200 column in sterile Phosphate Buffer Saline (PBS) (Cat. 20012-027; Gibco). The ectodomains of FGFR2 (residues 147-366, Uniprot ID P21802), EGFR (residues ID 25-525, Uniprot ID P00552), PDGFR (residues 33-314, Uniprot ID P09619), InsulinR (residues ID 28-953, Uniprot ID P06213), IGF1R (residues 31-930, Uniprot ID P08069), Tie2 (residues 23-445, Uniprot ID Q02763), IL-7Rα (residues 37-231, Uniprot ID P16871) were expressed in mammalian cells with a IgK Signal peptide (METDTLLLWVLLLWVPGSTG) (SEQ ID NO:1572) at the N-terminus and a C-terminal tag (GSENLYFQGSHHHI-HHHGSGLNDIFEAQKIEWHE) (SEQ ID NO:1573) which contains a TEV cleavage site, a 6-His-tag and an AviTag. VirB8 was expressed in E. coli with a C-terminal AviTag as previously described {Gillespie, 2015 #19}. The proteins were purified by Ni-NTA, and polished with size exclusion chromatography. Then, the AviTag-proteins were biotinylated with the BirA biotin-protein ligase bulk reaction kit (Avidity) following the manufacturer's protocol and the excessive biotin was removed through size exclusion chromatography. Biotinylated CD3 protein was bought from Abcam (Cat #ab205994). TGF-β was bought from Acro Biosystems (Cat #TG1-H8217). IGF1 was bought from Sigma (Cat #407251-100 ug). Insulin was bought from Abcam (Cat #ab123768). The caged Ang1-Fc protein was prepared as described previously {Divine, 2021 #77}, and was kindly provided by George Ueda.

### Yeast Surface Display

[0078] S. cerevisiae EBY100 strain cultures were grown in C-Trp-Ura media supplemented with 2% (w/v) glucose. For induction of expression, yeast cells were centrifuged at 6,000×g for 1 min and resuspended in SGCAA media supplemented with 0.2% (w/v) glucose at the cell density of 1×10\hat{ }7 cells per ml and induced at 30° C. for 16-24 h. Cells were washed with PBSF (PBS with 1% (w/v) BSA) and labelled with biotinylated targets using two labeling methods, with-avidity and without-avidity labeling. For the with-avidity method, the cells were incubated with biotinylated target, together with anti-c-Myc fluorescein isothiocyanate (FITC, Miltenyi Biotech) and streptavidin-phycoerythrin (SAPE, ThermoFisher). The concentration of SAPE in the with-avidity method was used at % concentration of the biotinylated targets. For the without-avidity method, the cells were firstly incubated with biotinylated targets, washed, secondarily labelled with SAPE and FITC. All the original libraries of de novo designs were sorted using the with-avidity method for the first few rounds of screening to fish out weak binder candidates, followed by several without-avidity sorts with different concentrations of targets. For SSM libraries, two rounds of without-avidity sorts were applied and in the third round of screening, the libraries were titrated with a series of decreasing concentrations of targets to enrich mutants with beneficial mutations. The combinatorial libraries were sorted to convergence by decreasing the target concentration with each subsequent sort and collecting only the top 0.1% of the binding population. The final sorting pools of the combinatorial libraries were plated on C-trp-ura plates and the sequences of individual clones were determined by Sanger sequencing. The competition sort was done following the without-avidity protocols with a very minor modification. Briefly, the biotinylated target proteins (H1, H3, TrkA, InsulinR, IGFIR, PDGFR and Tie2) were first incubated with an excessive amount of competitors (FI6v3. FI6v3, NGF, insulin, IGF1, PDGF and caged Ang1-Fc) respectively for 10 mins, and the mixture was used for labeling the cells. The non-specificity reagent was prepared using the protocol as described in {Xu, 2013 #13}. For non-specificity sort, the cells were firstly washed with PBSF and incubated with the non-specificity reagent at the concentration of 100 μg/ml for 30 mins. The cells were then washed and secondarily labelled with SAPE and FITC for cell sorting. The cells were then labeled with RBD using the above mentioned protocol.

### Miniprotein Expression

[0079] Genes encoding the designed protein sequences were synthesized and cloned into modified pET-29b(+) E. coli plasmid expression vectors (GenScript™, N-terminal 8 His-tag followed by a TEV cleavage site). For all designed proteins, the sequence of the N-terminal tag is MSHHHHHHHHSENLYFQSGGG (SEQ ID NO: 1560 (unless otherwise noted), which is followed immediately by the sequence of the designed protein. For proteins expressed with the maltose binding protein (MBP) tag, the corresponding genes were subcloned into a modified pET-29b(+) E. coli plasmid, which has a N-terminal 6 His-tag and a MBP tag. Plasmids were transformed into chemically competent E. coli Lemo21 cells (NEB). For the designs for TrkA, FGFR2, EGFR. IR, IGF1R, Tie2, IL-7Rα, TGF-β and the MBP tagged miniproteins, protein expression was performed using the Studier autoinduction media supplemented with antibiotic, and cultures were grown overnight. For designs for HA, PDGFR and CD3δ, the E. coli cells were grown in LB media at 37° C. until the cell density reached 0.6 OD600. Then, IPTG was added to the final concentration of 500 mM and the cells were grown overnight at 22° C. for expression. The cells were harvested by spinning at 4,000×g for 10 min and then resuspended in lysis buffer (300 mM NaCl, 30 mM Tris-HCL, pH 8.0, with 0.25% CHAPS for cell assay samples) with DNAse and protease inhibitor tablets. The cells were lysed with a sonicator for 4 minutes total (2 minutes on time, 10 sec on-10 sec off) with an amplitude of 80%. Then the soluble fraction was clarified by centrifugation at 20,000×g for 30 min. The soluble fraction was purified by Immobilized Metal Affinity Chromatography (Qiagen) followed by FPLC size-exclusion chromatography (Superdex™ 75 10/300 GL, GE Healthcare). All protein samples were characterized with SDS-PAGE with the purity higher than 95%. Protein concentrations were determined by absorbance at 280 nm measured using a NanoDrop™ spectrophotometer (Thermo Scientific) using predicted extinction coefficients.

### Circular Dichroism

[0080] Far-ultraviolet CD measurements were carried out with an JASCO-1500 equipped with a temperature-controlled multi-cell holder. Wavelength scans were measured from 260 to 190 nm at 25, 95° C. and again at 25° C. after fast refolding (˜5 min). Temperature melts monitored dichroism signal at 222 nm in steps of 2° C./minute with 30s of equilibration time. Wavelength scans and temperature melts were performed using 0.3 mg/ml protein in PBS buffer (20 mM NaPO4, 150 mM NaCl, pH 7.4) with a 1 mm path-length cuvette. Melting temperatures were determined fitting the data with a sigmoid curve equation. 9 out of the 13 designs retained more than half of the mean residue ellipticity values, which indicated the Tm values are greater than 95° C. Tm values of the other designs were determined as the inflection point of the fitted function.

### Biolayer Interferometry

[0081] Biolayer interferometry binding data were collected on an Octet RED96™ (ForteBio) and processed using the instrument's integrated software. For minibinder binding assays, biotinylated targets were loaded onto streptavidin-coated biosensors (SA ForteBio) at 50 nM in binding buffer (10 mM HEPES (pH 7.4), 150 mM NaCl, 3 mM EDTA, 0.05% surfactant P20, 1% BSA) for 360 s. Analyte proteins were diluted from concentrated stocks into the binding buffer. After baseline measurement in the binding buffer alone, the binding kinetics were monitored by dipping the biosensors in wells containing the target protein at the indicated concentration (association step) and then dipping the sensors back into baseline/buffer (dissociation). The binding affinities of Tie2- and IGF1R-mini binders were low, and MBP tagged proteins were used for the binding assay to amplify the binding signal. The binding assay for the Insulin receptor (IR) designs were conducted with Amine Reactive Second-Generation (AR2G ForteBio) Biosensors with the recommended protocol. In brief, the miniproteins were immobilized onto the AR2G tips and the InsulinR were used as the analyte with the indicated concentrations.

[0082] For the cross-reactivity assay, each target protein was loaded onto SA tips at the concentration of 50 nM for 325s. The tips were dipped into the miniprotein wells for 300s (association) and then dipped into the blank buffer wells for 600s (dissociation). The maximum raw bio-layer Interferometry signal binding was used as the indicator of binding strength. The maximum signal among all the miniprotein binders for a specific target was used to normalize the data for heatmap plotting.

Apparent SC₅₀ Estimation from FACS and NGS

[0083] The Pear™ program {Zhang, 2014 #61} was used to assemble the fastq files from the Next Generation Sequencing runs. Translated, assembled reads were matched against the ordered designs to determine the number of counts for each design in each pool.

[0084] The critical assumption to the fitting here is to pretend that the yeast cells displaying a particular design will follow a modified version of the standard KD equation relating fraction bound to concentration:

$${fraction\_collected}_{i} = \frac{concentration}{( concentration + {SC}_{50 , i} )} \qquad EQ - KD$$

[0085] where fraction_collectedᵢ is the fraction of the yeast cells displaying design i that were collected, concentration is the target concentration for sorting, and SC_{50,i} is the apparent SC₅₀ of the design (the concentration where 50% of the cells would be collected).

[0086] The next assumption is that all designs have the same expression level on yeast surface and that 100% of yeast cells express well enough to be collected in the “expression” gate.

[0087] These two assumptions, while probably false, allow fitting the data with only one free parameter per design and no global free parameters. The correct version of EQ-KD for this experiment likely has a different shape and slope from a perfect sigmoid, the net effect of correcting this would be that all SC₅₀ are scaled by a constant factor (which would not affect the relative comparisons made here). It can be shown by analyzing the data that different designs result in different expression levels on yeast (one can examine the fraction_collectedᵢ for strong binders at concentrations where binding should be saturated). The net result is that experimentally, EQ-KD is multiplied by a constant between 0 and 1 for each design. This constant seems to range from 0.2 to 0.7. As such, when fitting the data, fraction_collectedᵢ values above 0.2 are considered saturating. However, because the 0.2 mark may represent 90% collection for poorly-expressing designs and 30% collection for strongly-expressing designs, the resulting SC₅₀ fits may vary by up to 5-fold. The alternative is to try to estimate an expression level: however, this becomes increasingly difficult with weaker binders that never saturate the experiment.

[0088] Apparent SC₅₀ Estimation from FACS and NGS: Point Estimates

[0089] The following equation may be used to determine the fraction_collectedᵢ for a single design in a single sort:

$$EQ - FRAC$$

$${fraction\_collected}_{i} = \frac{proportion\_child {\_pool}_{i}}{proportion\_parent {\_pool}_{i}} \times facs\_collection \_fraction$$

[0090] where fraction_collectedᵢ is the proportion of cells carrying design i that were collected during the sort, proportion_child_poolᵢ is the proportion of the total NGS counts for design i from the pool that was collected, proportion_parent_poolᵢ is the proportion of the total NGS counts for design i from the pool that was the input for the sorter, and facs_collection_fraction was the fraction of the yeast cells collected during the specific sort (a number extracted from the FACS machine itself).

[0091] This point-estimate method is best suited for asking the question: which designs have SC₅₀<SC_{50,0?} by determining the expected fraction_collectedᵢ for a given sorting concentration and SC_{50,0}. The sorting concentration and SC_{50,0} should be selected such that EQ-KD results in an expected fraction_collectedᵢ less than 0.2 in order to circumvent the expression issues mentioned above. Then, any designs with fraction_collectedᵢ greater than the cutoff may say their SC₅₀ is less than SC_{50,0}. Designs with low numbers of counts are suspect, see the Doubly-Transformed Yeast Cells section. For this analysis, any designs with fewer than max_possible_passenger_cells cells were eliminated.

[0092] This method may be applied to avidity sorts, however, the resulting SC₅₀ would be the SC₅₀ during avidity experiments. It is unclear to the authors what the precise mathematical effect of avidity is and as such we do not compare avidity SC_{50S} with non-avidity SC_{50S}.

Apparent SC₅₀ Estimation from FACS and NGS: Doubly-Transformed Yeast Cells

[0093] Doubly-transformed yeast cells represent a major source of error in these experiments. While rare, a yeast cell that contains two plasmids, one of a strong binder and one of a non-binder, will carry the non-binder plasmid through the sorting process. The net result is that the non-binder will end up with counts that track the strong binder, however, at a greatly reduced absolute number. (Rare is a relative term here. While the odds of any two specific plasmids being in one cell is low, in the entire pool of yeast, doubly transformed cells seem to be quite common.)

[0094] We chose to address this issue by making the following assumption: non-binders that take advantage of a doubly-transformed yeast cell do so from precisely one double-transformation event. In other words, we assume that the same non-binding plasmid did not get doubly transformed into two separate strong-binding yeast. This assumption allows us to estimate the largest number of cells we would expect to see from a doubly-transformed plasmid:

$$EQ - MAX$$

$$max\_possible \_passenger \_cells = \frac{{cells\_collected}_{i\_ max}}{cells\_sorted \_R {1}_{i\_ max}} \times cell\_copies \_before \_first \_sort$$

[0095] where max_possible_passenger_cells is the highest number of cells that we would expect a non-binding plasmid to occupy, cells_collected_{i_max} is the number of cells collected in this round for the design with the most number of cells collected, cells_sorted_Rl_{i_max} is the number of cells sorted for design i_max (the same design from cells_collected_{i_max}), and cell_copies_before_first_sort is the number of copies of each cell that occurred before the first sort (2^{#cell_divisions}) The number of cells_collectedᵢ may be approximated by multiplying the number of cells the FACS machine collected by the proportion of the pool that design i represents. The number of cells_sortedᵢ may be estimated by either dividing the cells_collectedᵢ by the facs_collection_fraction or by multiplying the number of cells fed to the FACS machine by the proportion of design i in that pool.

[0096] With this number in hand, one can set a floor for the number of cells that one would expect to see. Any design with fewer than this number of cells cannot be considered for calculations because it is unclear whether or not that cell is part of a doubly-transformed yeast cell. On the whole, this method reduces false-positive binders, but also removes true-positive binders that did not transform well. It is wise to simply drop designs from the downstream calculations that did not transform well.

Apparent SC₅₀ Estimation from FACS and NGS: Full Estimate

[0097] Estimation of an upper and lower bound on the SC₅₀ from the data may be performed by looking at an arbitrary number of sorting experiments. Taking a P(SC₅₀=SC_{50,0}|data) and performing Bayesian analysis, one arrives at a confidence interval for the actual SC₅₀ value. This analysis may be performed at every sort and the resulting distributions combined to produce a robust estimate.

[0098] Each sort may be modeled as a binomial distribution where: p=fraction_collected from EQ-KD using concentration=sorting_concentration and SC₅₀=SC_{50,0}; n=cells_sortedᵢ; and x=cells_collectedᵢ. By performing this analysis at a range of SC_{50,0} values and examining the probability this could happen by the binomial distribution, one arrives at P(SC₅₀=SC_{50,0}|data). Specifically for this analysis, the cdf of the binomial was used with the null hypothesis that SC₅₀=SC_{50,0}.

[0099] Care should be taken for the valid range of p. As stated previously, it is wise to cap the expected value of p to 0.2 to account for expression levels and to floor the value such that n*p does not fall below max__possible_passenger_cells. In our implementation, if x falls into a range that has been clipped, a probability of 1 is returned.

### SSM Validation: Relax Protocol

[0100] In order to remove artifacts from design and to discover the best orientation for each SSM mutation, all binders were relaxed using the Rosetta™ beta_nov16 score function before calculations began (30 replicates using 5 repeats of cartesian FastRelax™ taking the best scoring model). Relaxation of point mutants then used the standard cartesian FastRelax procedure and allowed all residues within 10 Å of the mutation to relax. The backbone coordinates of those residues on the binder were allowed to relax while the target was held constant. The best of 3 (as evaluated by Rosetta™ energy) was chosen as the representative model.

### SSM Validation: Entropy Score

[0101] In order to validate that the designed binder was folded into the correct shape and was using its designed interface to bind to the target, the entropy of the interface, monomer core, and monomer surface were examined. For each position on the binder, the sequence entropy (Shannon entropy) of each position was calculated using the observed frequencies of each amino acid in the Next Generation Sequencing data. The specific pool that was chosen for this analysis was the pool with concentration closest to 10-fold lower than the calculated SC₅₀ of the parent.

[0102] After the per-position sequence entropy was calculated, the average per-position entropy of the SASA-hidden positions contacting the target (interface core), the SASA-hidden positions not contacting the target (monomer core), and the fully exposed positions not contacting the target (monomer surface) were calculated. A simple subtraction was performed according to EQ-ENTROPY:

$$EQ - ENTROPY$$

$$intermediate\_entropy \_score = {S}_{monomer \_ core} + {S}_{interface \_ core} - {S}_{monomer \_ surface}$$

$$where {S}_{region} is the average entropy of that region .$$

[0103] Finally, the probability that the score could have come from totally random data was computed by performing the above calculation on the actual data, and then performing the same calculation 100 times, but randomly mismatching the observed counts among all SSM point mutations. In this way, the experimental noise is kept constant among the 100 decoy datasets. The final step to arrive at a p-value was to calculate the mean and standard deviation of the 100 decoy intermediate_entropy_scores and to find the p-value with the Normal CDF function of the binder's intermediate_entropy_score.

### SSM Validation: Rosetta™ Accuracy Score

[0104] In order to further assess the accuracy of the design model, the correlation between the predicted effect on binding by Rosetta™ was compared with the experimental data. The effect from Rosetta™ can be broken into two components: monomer stabilization/destabilization and interface stabilization/destabilization. The effect on the monomer energy will affect the fraction of the proteins that are folded in solution. This fraction of folded proteins will then worsen the affinity because only the folded proteins are able to bind. The effect on the monomer stability was estimated by taking the difference in Rosetta™ energy between the native relaxed dock and the mutant relaxed dock and looking only at the change in Rosetta™ score of the docked protein (excluding energies arising from cross-interface edges). The effect on the target energy was calculated the same was and was considered to directly affect the binding energy. The binding energy was calculated by taking the difference in Rosetta™ score between the docked and undocked conformations (but with no repacking or minimization in the unbound form).

[0105] The effect on the P(fold_monomer) was estimated by first determining the predicted ΔG_{fold} of the native protein.

$$P ( fold\_monomer ) = exp ( \frac{Δ {G}_{fold} + Δ {G}_{mutant \_ effect}}{kT} ) \qquad EQ - PFOLD$$

$$Δ {ddG}_{monomer \_ effect} = kT ln ( \frac{{P ( fold\_monomer )}_{native}}{{P ( fold\_monomer )}_{mutant}} ) \qquad EQ - ddg\_monomer$$

[0106] where k is the Boltzmann constant and T is temperature which was set to 300 K for this calculation.

[0107] Using EQ-ddg_monomer and EQ-PFOLD, the predicted ΔG_{fold} for the native design was estimated by performing a least-squares fit of all mutations that did not occur in residues at the interface. A rudimentary confidence interval was created by allowing all ΔG_{fold} values that resulted in a root mean squared error of within 0.25 kcal/mol of the best ΔG_{fold} value. Typical confidence intervals spanned 3 kcal/mol.

$$EQ - DDG\_SUM$$

$$Δ {ddG}_{Rosetta} = Δ {ddG}_{monomer \_ effect} + Δ {ddG}_{interface \_ effect} + Δ {ddG}_{target \_ effect}$$

[0108] With the ΔG_{fold} in hand, the predicted effect on the binding energy could be computed according to EQ-DDG_SUM. The values of ΔG_{fold} inside the confidence range for ΔG_{fold} that produced the largest and smallest ΔddG_{Rosetta} were used to produce a confidence interval for ΔddGa_{Rosetta}.

[0109] The per-position accuracy was assessed by determining whether the confidence interval for ΔddG_{Rosetta} was compatible with the confidence interval for the SC₅₀ from the experimental data. A buffer of 1 kcal/mol was allowed.

[0110] With the per-position accuracies in hand, the overall percentage of mutations that Rosetta™ was able to explain in the monomer_core and interface_core was assessed. This produced an overall Rosetta™ accuracy score.

[0111] In the same way as the Entropy score, 100 decoys with randomly shuffled SC₅₀ values were subjected to the same procedure. The mean and standard deviation of the decoys was determined and the p-value for the Rosetta™ score was determined using the Normal CDF function.

1. A polypeptide comprising an amino acid sequence at least 35% identical to the amino acid sequence selected from the group consisting of SEQ ID NO:1-1559 and 1561-1570, not including any functional domains added fused to the polypeptides (whether N-terminal, C-terminal, or internal), and wherein the 1, 2, 3, 4, or 5 N-terminal and/or C-terminal amino acid residues may be present or absent when considering the percent identity.

2. The polypeptide of claim 1, wherein substitutions relative to the reference polypeptide are selected from the residues listed as “best” or “tolerable” at each position immediately below the reference polypeptide listed in Tables 13A-13HHH.

3. The polypeptide of claim 1, wherein substitutions relative to the reference polypeptide are selected from the residues listed as “best” or “tolerable” at each position immediately below the reference polypeptide listed in Tables 13A-13HHH.

4. The polypeptide of claim 1, wherein 1, 2, 3, 4, 5, 6, 7, 8, 9, 10, 11, 12, 13, 14, 15, or all interface residues are as defined in the reference polypeptide listed in Tables 13A-13HHH.

5. The polypeptide of claim 1, wherein protein core residues listed in Tables 13A-13HHH are substituted relative to the reference polypeptide only with conservative amino acid substitutions.

6. The polypeptide of claim 1, wherein insertion of amino acid residues relative to the reference polypeptide occurs at a residue indicated in the column “loop/insertion” column of Tables 13A-13HHH.

7. The polypeptide of claim 1, wherein 1, 2, 3, 4, or 5 N-terminal and/or C-terminal amino acid residues are not included when determining the percent identity relative to the reference polypeptide.

8. The polypeptide of claim 1, wherein all residues are included when determining the percent identity relative to the reference polypeptide.

9. A fusion protein comprising the polypeptide of claim 1 fused to a functional polypeptide.

10. A fusion protein comprising two or more copies of the polypeptide of claim 1.

11. The fusion protein of claim 10 wherein the two or more copies of the polypeptide are identical.

12. The fusion protein of claim 10 wherein the two or more copies of the polypeptide are not all identical.

13. A scaffold comprising 2 or more copies of the polypeptide or fusion protein of claim 1.

14. A nucleic acid encoding the polypeptide of claim 1.

15. An expression vector comprising the nucleic acid of claim 14 operatively linked to a suitable control sequence.

16. A host cell comprising the expression vector of claim 15.

17. A pharmaceutical composition comprising:
(a) the polypeptide claim 1, ; and
(b) a pharmaceutically acceptable carrier.

18. A method for using; the polypeptide claim 1 for any suitable use as disclosed herein.

19. The method of claim 19, wherein the use comprises treating a tumor or infection.

20. (canceled)

The application's sequence listing, which the Patent Office published only in electronic form, follows.

SEQUENCE LISTING (1574 sequences)

SEQ ID NO: 1 - protein, 62 aa, synthetic construct
  REGION 1..62: note = Synthetic
NHIACEIHNPEAAKEIAKVANVRRVFVIKQPGNRYFVLLKDADPEGVKKVASKYNARCVIRE

SEQ ID NO: 2 - protein, 63 aa, synthetic construct
  REGION 1..63: note = Synthetic
SDELFSKVFLKVTELSMIVMNAKTEDEKKTALTKIKQIADKVQDEELSKFVKRALEHVKKEVG

SEQ ID NO: 3 - protein, 63 aa, synthetic construct
  REGION 1..63: note = Synthetic
SPDEAKKLLQEAEKLARKQNDRMELAYVEFLKHVLENAKRLNDKRAVESVRELARDALEELQS

SEQ ID NO: 4 - protein, 65 aa, synthetic construct
  REGION 1..65: note = Synthetic
SLEEVKELIRKLVPDPRLVWALEDLLELLKKGDPLAEEVLRFYLASAREQGDKDLTKAIELVLKT

SEQ ID NO: 5 - protein, 62 aa, synthetic construct
  REGION 1..62: note = Synthetic
DDESLKLLLILVQIQLALERGEISNDQAKELAKRVEEKARKLGDEQVQRNVENVKEVIERFG

SEQ ID NO: 6 - protein, 62 aa, synthetic construct
  REGION 1..62: note = Synthetic
DHWEEVFRWALELLQEATEQNDPTKAKKILEEAHKLLRRELSEEEARAVVRYLKQLVDRELS

SEQ ID NO: 7 - protein, 65 aa, synthetic construct
  REGION 1..65: note = Synthetic
DEAAEEVLRYLKKLGDPELAELIERLLERVRKKKDPDLERTLEIIAVAVLYGDPEIARQALRALH

SEQ ID NO: 8 - protein, 65 aa, synthetic construct
  REGION 1..65: note = Synthetic
DELRELINDAQNKNDPELLKKVLELIEELIRRGDPSYQEIVLLLLFVADLLGDPEITRLAEELLK

SEQ ID NO: 9 - protein, 65 aa, synthetic construct
  REGION 1..65: note = Synthetic
SELSEEALRLLEEGNPRDAEHVLIDLLFELENRGDKELSELVLEILELLIRGDPDEARKLIKELT

SEQ ID NO: 10 - protein, 65 aa, synthetic construct
  REGION 1..65: note = Synthetic
PLEEVKKVVEEALKDDPELVRAVKTIIEAVKKGENDPIFLELLLRLLIETFGDPRLREALELVRK

SEQ ID NO: 11 - protein, 61 aa, synthetic construct
  REGION 1..61: note = Synthetic
SDEERRELEERLERAVREGDEHHLRFLSQRLILLWWIAGKLDREEARKYVEELIKELKKRV

SEQ ID NO: 12 - protein, 63 aa, synthetic construct
  REGION 1..63: note = Synthetic
DLEEEAEKLVKEAEKYARSVDDPAAKMHVHLVKLRLKLAKERISDKEKILRFVKEQVDLVKET

SEQ ID NO: 13 - protein, 65 aa, synthetic construct
  REGION 1..65: note = Synthetic
DRHVADLIQHLLERGVPPEEILELIEDYIRWTGNPRFKKALELLEKLTRELGDPEEALRLFVERG

SEQ ID NO: 14 - protein, 63 aa, synthetic construct
  REGION 1..63: note = Synthetic
SPEDAEKLIKTIKTIAKKRNDRMELAYVKFLESSLKQAQRYNDEERIEDITELLEDALKEIQS

SEQ ID NO: 15 - protein, 64 aa, synthetic construct
  REGION 1..64: note = Synthetic
DYTVDLAIKFVEEVVKELKNDPDPRSQKLAEELERLIRKAKNAEDPNKKHTLVHKAFDIAVQAM

SEQ ID NO: 16 - protein, 62 aa, synthetic construct
  REGION 1..62: note = Synthetic
DEEQETRLKLLLLLVQLQHLAKKDPDTAETEIDKIYKLAKKLGDETIRENAENAKRIVQELK

SEQ ID NO: 17 - protein, 62 aa, synthetic construct
  REGION 1..62: note = Synthetic
SEEALKIFLAILRIQLHYERGEISPETAIRLLQKLIKRAEELGDEDVKRLAKRLLEKIRKEK

SEQ ID NO: 18 - protein, 63 aa, synthetic construct
  REGION 1..63: note = Synthetic
DLDQLIETLIKLLKKLSKKYPEFKFHARYAIERANRIRKSDPRNSRAAVSLLEQALERIQKQA

SEQ ID NO: 19 - protein, 65 aa, synthetic construct
  REGION 1..65: note = Synthetic
DYFFHSTRTYRGDGAEERAEKEAKEIVRKIAETIARKLNAKRVTLQVIVVRRGDLILISLLFLIR

SEQ ID NO: 20 - protein, 65 aa, synthetic construct
  REGION 1..65: note = Synthetic
SEELIKKALELLRQGNPDRAAQVLLFLAFQTGDPRVRELFSLLVEAMQKNDPELLKRVRRLLEET

SEQ ID NO: 21 - protein, 62 aa, synthetic construct
  REGION 1..62: note = Synthetic
LEKLERVALLAVRLYMRIGDPEIAKIWFKVMELLHAYQAGHLDEEEAKRRADKLEKELRKFI

SEQ ID NO: 22 - protein, 61 aa, synthetic construct
  REGION 1..61: note = Synthetic
DPSKELDKVYRTAFKRITSIPDKEKQKEVVKEATELLRRIAKDEEEKKLASLISLFLKTLS

SEQ ID NO: 23 - protein, 60 aa, synthetic construct
  REGION 1..60: note = Synthetic
DKKELSDTAEKLLKDALDKNDDSKFISAVFFALKVAKDVNDERLERIVVKLYNEFMNRYH

SEQ ID NO: 24 - protein, 55 aa, synthetic construct
  REGION 1..55: note = Synthetic
DYERVISRAIELALKKGDEKALHILNEIFFAAHRGELDPTEAERLARRIEKKLRS

SEQ ID NO: 25 - protein, 55 aa, synthetic construct
  REGION 1..55: note = Synthetic
DLREKLQELWWRALEKGNEKAERLALRAFMGAWHGDTSEEEAKKIITEVERLIKS

SEQ ID NO: 26 - protein, 56 aa, synthetic construct
  REGION 1..56: note = Synthetic
SEIHKKLARLLSKAIQKGDRKANHIVIRAAMAYEKGLIDPDQARKLAEKAERILRS

SEQ ID NO: 27 - protein, 55 aa, synthetic construct
  REGION 1..55: note = Synthetic
DIEHLLARAIHRSAQLGDREAVELLTRIFFALEAGKVSEEWAERLARTILEHQRN

SEQ ID NO: 28 - protein, 65 aa, synthetic construct
  REGION 1..65: note = Synthetic
SLVERVIEQVEKRGLPPEALVLTVWLALVKAGDPEKARLVEELAREVFEGKLPPEELKRLLREIE

SEQ ID NO: 29 - protein, 65 aa, synthetic construct
  REGION 1..65: note = Synthetic
DEVHHFLLRLFFKDPDDEDVERILALFLLLKKEGIPPEEVTEIVIKFAEKLGNPELAKELKKILK

SEQ ID NO: 30 - protein, 65 aa, synthetic construct
  REGION 1..65: note = Synthetic
SEEERIAKLIIELLKRGINPERAVARVMFEIMELGDPELNHLVLRFFFTLKRDPEKFEELLRKLG

SEQ ID NO: 31 - protein, 60 aa, synthetic construct
  REGION 1..60: note = Synthetic
SKEERLKELLRLIKEAIKRNLTEEVERLAREAAEIAQELRDEEVLQEALLLWFRFEIRRR

SEQ ID NO: 32 - protein, 64 aa, synthetic construct
  REGION 1..64: note = Synthetic
DELFQRVMELAFRLVLAAREKNDKDAEERAQRLFRSVAKALESGDQDTAKTLVDRIEKYVKKFG

SEQ ID NO: 33 - protein, 63 aa, synthetic construct
  REGION 1..63: note = Synthetic
DPEKIIRELVRLALEAARKLNDDRVATAVLTLLYAVLRLEKRDPEKAKKLLKEVEEKVKKLIS

SEQ ID NO: 34 - protein, 62 aa, synthetic construct
  REGION 1..62: note = Synthetic
DEVEELSKKVLHIATRLAFSPNPEDQQLWFKAMRLLDKAESIPDRDKATKVLRKAEKLVSSS

SEQ ID NO: 35 - protein, 61 aa, synthetic construct
  REGION 1..61: note = Synthetic
TPEEVMRTAFELLSEAARNNDRDRLKEIVKWVEDLVRKDPRVKDALEQVRLTLRFMTHLAS

SEQ ID NO: 36 - protein, 53 aa, synthetic construct
  REGION 1..53: note = Synthetic
SERTASEVIMHAMQLGDHHVMREANRVYFGIVRGELRPEDAKKLLDTLRRQLE

SEQ ID NO: 37 - protein, 65 aa, synthetic construct
  REGION 1..65: note = Synthetic
SEDESLKESLKHASKFFDIPSFEVRNSNGRLSVTVDGDDEKARMFLITAQFAAMLRGLKLDVRTK

SEQ ID NO: 38 - protein, 62 aa, synthetic construct
  REGION 1..62: note = Synthetic
DLREILRKLIEISEELLRKATDEELRELLELVIALSKEALRENDEELLEAAIRYNEVLIRNA

SEQ ID NO: 39 - protein, 62 aa, synthetic construct
  REGION 1..62: note = Synthetic
DFDTHEFEELEKVLEEARRKNDFRLAERAARLAAESLERYRDAELVREALQEALLLWLALYK

SEQ ID NO: 40 - protein, 64 aa, synthetic construct
  REGION 1..64: note = Synthetic
PELDIAVVVAQIMADKIVKKASNPEIQKKAKTVKKLLEEARQKKDKDTVQKLWWKAVTLWQLVV

SEQ ID NO: 41 - protein, 53 aa, synthetic construct
  REGION 1..53: note = Synthetic
SERKLAHLLMIAVQQGDHKANVMLLRAVFLLHKGEASEEQADKIADEAKKRLS

SEQ ID NO: 42 - protein, 61 aa, synthetic construct
  REGION 1..61: note = Synthetic
DWKEIEKTARDLLKKARENNDRRTAFLVAVALKLAEIARKIQDPEERKRIEEVAKAALADA

SEQ ID NO: 43 - protein, 53 aa, synthetic construct
  REGION 1..53: note = Synthetic
TEEKIIRLWLDAARKGDRKANTLALRILFGLKRGEIDESQADKLADKIKKSLS

SEQ ID NO: 44 - protein, 65 aa, synthetic construct
  REGION 1..65: note = Synthetic
SRLEEIIRLAEELGNPYVAETLKMFLRAVRNGQLSPEWALANARALADYFGDPELLRLIEELIKK

SEQ ID NO: 45 - protein, 63 aa, synthetic construct
  REGION 1..63: note = Synthetic
NPYEELLRLIERLFERLQKENDEEVEKALSFVNALLMLIARTTDEETKKELLRLALEKAKKVL

SEQ ID NO: 46 - protein, 61 aa, synthetic construct
  REGION 1..61: note = Synthetic
DEEEEAREHIQRQLEELEKHDPRAAVIFAAYIIERARENNDETARKIAEKLLKEIEKRYRS

SEQ ID NO: 47 - protein, 65 aa, synthetic construct
  REGION 1..65: note = Synthetic
SEELKEEAKRLIKLLKDLARKASDRRERFILAALAASLEKALKNNDEELLRKLIEVAKSAIRRIQ

SEQ ID NO: 48 - protein, 61 aa, synthetic construct
  REGION 1..61: note = Synthetic
SREEVLHILNHLYFIAYERNDEELQHILARAMYIVFELLNRGDEESAKKVAEKAKKIVDKK

SEQ ID NO: 49 - protein, 65 aa, synthetic construct
  REGION 1..65: note = Synthetic
DKEELIEEAIEKLAPSPEAERYLRELLKEFKELGNPEAFLFLLWLAAERLGNPEVKRLVEELLRR

SEQ ID NO: 50 - protein, 63 aa, synthetic construct
  REGION 1..63: note = Synthetic
DDKEKTVKTIVRKLLRRAAHVDDPEVRTALLTLAYILERALENQDDEALKRASKLAEKVLKSG

SEQ ID NO: 51 - protein, 65 aa, synthetic construct
  REGION 1..65: note = Synthetic
HETRDLNIRIETKREEELEHAERAQRLYFEAYLDALRNRGNKVDAEIRLHIDGDTSHSRAHFRFT

SEQ ID NO: 52 - protein, 64 aa, synthetic construct
  REGION 1..64: note = Synthetic
SEEHEKAREIAKKLAKRVRSGKLDSRQAKKIVARRYHHASRSGDKELAAILILVLFLLDEILRS

SEQ ID NO: 53 - protein, 62 aa, synthetic construct
  REGION 1..62: note = Synthetic
DEAQELARIVFELIVRLHRSPDPKDRKAAHFALRLLMKALKAQDPNERRSLLKTAIKYVRNT

SEQ ID NO: 54 - protein, 65 aa, synthetic construct
  REGION 1..65: note = Synthetic
DITWHARYTFHRHDEQAKREAESLAFLEVYKLERRAEELGLTSRFRIRSHEHNNRITIHLEIHIH

SEQ ID NO: 55 - protein, 62 aa, synthetic construct
  REGION 1..62: note = Synthetic
DPEEIKQRAEEIKKEFQKKGVSPEIQFAIEQVIKYALEVGLSPKDIRTTIELTVRFAEELEK

SEQ ID NO: 56 - protein, 64 aa, synthetic construct
  REGION 1..64: note = Synthetic
SPEHAERLAKMLETLVKHAVKNPEERKTAETLIKQVKELIKKGDEDSAQELLAKVYKIVWKAQH

SEQ ID NO: 57 - protein, 63 aa, synthetic construct
  REGION 1..63: note = Synthetic
DKDEVVQLALRILFEAYRRGNEEYYRKAQHLAALAFEAAEKNDEELLKKIEKKLRTLWKKLQS

SEQ ID NO: 58 - protein, 64 aa, synthetic construct
  REGION 1..64: note = Synthetic
DDDKEKKKKVKKKLDSIVEQAKKDPKHAMSLVLSIWMEAHRKNDEIVAKIAFEAWLKIMRIYSK

SEQ ID NO: 59 - protein, 64 aa, synthetic construct
  REGION 1..64: note = Synthetic
DEHLRKLLEKVMTLATKAWENNDEKVVSLLAEAQFWIALVDQDPRKKEEAQKRVETLLKQAEST

SEQ ID NO: 60 - protein, 62 aa, synthetic construct
  REGION 1..62: note = Synthetic
SEKLFKDINSLVISAFMAGVISEHEASRILRRLFEAYDRGLTEEVKKIKKEVKKLIKKARKS

SEQ ID NO: 61 - protein, 65 aa, synthetic construct
  REGION 1..65: note = Synthetic
SLLSQLLMEALQKGDPELNHLLLAVIFLAHERGISPEEIDKLLEKLERELGDPREAIKLLLELLR

SEQ ID NO: 62 - protein, 65 aa, synthetic construct
  REGION 1..65: note = Synthetic
GPLNLLELTLWLASRRNPVARVLLRILRELRKRIDPEEVLKILEEVARRLGDPFLLRNIEFILRL

SEQ ID NO: 63 - protein, 65 aa, synthetic construct
  REGION 1..65: note = Synthetic
SEEEKLTELSERVQKFFGLEHVEVRLNNGTITVTVRGDDERADQAIFFVRFFAQLAGIPVDYKKQ

SEQ ID NO: 64 - protein, 65 aa, synthetic construct
  REGION 1..65: note = Synthetic
SEVELATKMIKHLAKQFGVPSVSVSYSNGRVRVTFKGNDDRVQQARLTALFVAHLVGVPLEVQTR

SEQ ID NO: 65 - protein, 64 aa, synthetic construct
  REGION 1..64: note = Synthetic
DPDEILDRVAQTLLTLAFQHPDDPELLKAFRRVVEISQKAKKLSDPTQKERLARLAQRILEEVS

SEQ ID NO: 66 - protein, 51 aa, synthetic construct
  REGION 1..51: note = Synthetic
SIEEEILRWQFLAFKLGDPTLARLALRASHAYIEGDKKKARELIKKARKWY

SEQ ID NO: 67 - protein, 65 aa, synthetic construct
  REGION 1..65: note = Synthetic
SFEEVAELLRRAGLSPTEIITILYRLLRAFRHDPERAKELVEELVKKLGLPPEARELLKELLTKH

SEQ ID NO: 68 - protein, 63 aa, synthetic construct
  REGION 1..63: note = Synthetic
TKEILQKVIEIVLKLVKKGVDPEQAVKIIRKILSELIRQGKISKEEANMATVTAMFVAHLAKG

SEQ ID NO: 69 - protein, 61 aa, synthetic construct
  REGION 1..61: note = Synthetic
DEKTLAQEIIEEAKRAWEKYKDDPDFLREFLRELLREAYELRLEEAIHFIQFLFFRLQLEG

SEQ ID NO: 70 - protein, 65 aa, synthetic construct
  REGION 1..65: note = Synthetic
DEIVRELEKLAKLPDAHMRLTVFLIRLFIHDPNDEKVEKLLAVLLELLLRGVSPEEIIKILKRVE

SEQ ID NO: 71 - protein, 50 aa, synthetic construct
  REGION 1..50: note = Synthetic
SSEKLKRAVEEARRKGDFELLWRIQLIALELGDEEVQNLAARAVMEMAKR

SEQ ID NO: 72 - protein, 64 aa, synthetic construct
  REGION 1..64: note = Synthetic
DPKEEAKKVTRLLLKLAHNADDDEIRVELLTLAYALRRALERNDEEALKRVISKARKFIKDVKS

SEQ ID NO: 73 - protein, 65 aa, synthetic construct
  REGION 1..65: note = Synthetic
SRDELVEENIRFLARSAGVPSVSVSVSNGRISVTVDGDDEAAQELSSQALLYAHLAGLDLKVTIR

SEQ ID NO: 74 - protein, 64 aa, synthetic construct
  REGION 1..64: note = Synthetic
DEEKEKLRELAHESIRVALKRARSDEDHLRIARLYLALEKAVENNDKDLVKHLLEITTELAKRL

SEQ ID NO: 75 - protein, 63 aa, synthetic construct
  REGION 1..63: note = Synthetic
DKSDAEKILREALRLVWELGDRELFHLVSRLYLAFVRADKNNDKDLLDEITRQAEELLKRIKS

SEQ ID NO: 76 - protein, 54 aa, synthetic construct
  REGION 1..54: note = Synthetic
NWEEAAALALESASRAGDRELNEEILRIFFAVRRGEISEEEAHEMLREIAEKSR

SEQ ID NO: 77 - protein, 65 aa, synthetic construct
  REGION 1..65: note = Synthetic
SELLEKELRELLKNGNLEQAVLLIWFALHEAGDPERAEEVWKLLREALERGDPDLVRKIIEEALK

SEQ ID NO: 78 - protein, 63 aa, synthetic construct
  REGION 1..63: note = Synthetic
SWEELYEKAKKLVEQAKKENDEDKLNKATLLVYMAHLAASELGDPTAQTSVERLAAHVFHVAI

SEQ ID NO: 79 - protein, 65 aa, synthetic construct
  REGION 1..65: note = Synthetic
SEEIEELIKELFRKARNPEVRTVLATLWLALERARSPEEREEIERLLRLIEEDPRLAREILKKLN

SEQ ID NO: 80 - protein, 49 aa, synthetic construct
  REGION 1..49: note = Synthetic
DSKELKRLLKEAEKKGDLELANRVAFLAHELGDEEVLRLASEVLSRIMG

SEQ ID NO: 81 - protein, 56 aa, synthetic construct
  REGION 1..56: note = Synthetic
SEIHKKLSELMMQAMQKGDEKALHIVNHAYFAYERGEIDPDQARKLAEEAERLLRS

SEQ ID NO: 82 - protein, 65 aa, synthetic construct
  REGION 1..65: note = Synthetic
GEEVLEKVERLAGGDPRLIAYALLRLFREARRRGDKDLLKKIEEAVELLERKDPELARLIKNSLP

SEQ ID NO: 83 - protein, 62 aa, synthetic construct
  REGION 1..62: note = Synthetic
DEWDERLKETFKKLQELLKQGKEEEAEKILKELIHEAEERNDEEAVQKALLLWFRLLTERRK

SEQ ID NO: 84 - protein, 62 aa, synthetic construct
  REGION 1..62: note = Synthetic
DHWKEVEKWADTLLDEATKQNDPQKALFILFMAFLLLRRELSEEEAQRVISKLIRKVHERLR

SEQ ID NO: 85 - protein, 65 aa, synthetic construct
  REGION 1..65: note = Synthetic
DEEEEIRELIEKAVPDPELRRLLKENLKRLEEDGVPPEEILLTLAFAAERYGDPEVARLLFELLR

SEQ ID NO: 86 - protein, 65 aa, synthetic construct
  REGION 1..65: note = Synthetic
SERELFQRNVEFLARTAGVPSVEVRYTNGKYHVHLHGDNEALKDAKRQVELFAMFANLDVKVTTH

SEQ ID NO: 87 - protein, 61 aa, synthetic construct
  REGION 1..61: note = Synthetic
DETTKTAETLIKQLAEKAKNVPDPINVLTLLFAAMLLAKEANDPRLEKLVDKLVREVLQYV

SEQ ID NO: 88 - protein, 65 aa, synthetic construct
  REGION 1..65: note = Synthetic
SEEELRRLKELLKKVNSPEAQMVLVTLLYLEHLGVSPEMVLRLLEEMLKRINPEALKLVKELLRR

SEQ ID NO: 89 - protein, 62 aa, synthetic construct
  REGION 1..62: note = Synthetic
DRTEILTLAFAILLMAKEKQIPEIEKLARKVVHLFSAVQRGELDETEATKRARHLWSLASSY

SEQ ID NO: 90 - protein, 55 aa, synthetic construct
  REGION 1..55: note = Synthetic
DEIQRELNHVYFEAHERGDEELVQKVTRVLYALFAGKIDKKEARKLVEKLKKLLS

SEQ ID NO: 91 - protein, 64 aa, synthetic construct
  REGION 1..64: note = Synthetic
DEIRETHHLILRLFFWAEEKNDREAEKIAARLLELQAHALARRDEELLKKISKEAAKIVKELLK

SEQ ID NO: 92 - protein, 61 aa, synthetic construct
  REGION 1..61: note = Synthetic
DPDHAARLVNVLAFLAVEKNDEEAQREVSELIMIVMRAKENNDEEAVKEVEKRAKELLSKL

SEQ ID NO: 93 - protein, 55 aa, synthetic construct
  REGION 1..55: note = Synthetic
SEIEELLVHLLRLARELGNREALHVVLRAIIAYKRGRADEKQIRKLLKKAKSLLS

SEQ ID NO: 94 - protein, 63 aa, synthetic construct
  REGION 1..63: note = Synthetic
EVDELQKIAKKVRELAKKQNDEAALRTVEIALRALERAKQKNDEREVEAAKLAIAAAREHVEG

SEQ ID NO: 95 - protein, 62 aa, synthetic construct
  REGION 1..62: note = Synthetic
DQETVKKLESKADELAKKITDPRKRFLASVVKVNARRAKNAEDPNDQTELIELAEIILRHLG

SEQ ID NO: 96 - protein, 61 aa, synthetic construct
  REGION 1..61: note = Synthetic
DQEEAEKILQRLLRIAYEARDEEFFLEVSLLAFAHELALEEGDHEALEESIRIAEELLKEA

SEQ ID NO: 97 - protein, 63 aa, synthetic construct
  REGION 1..63: note = Synthetic
DEELKTLEKIVARLFHHAARNNDRKSLELATRAFFALVEAKNADEEQQKKLKTLVKQLIKKIK

SEQ ID NO: 98 - protein, 64 aa, synthetic construct
  REGION 1..64: note = Synthetic
DLEEEADHLLSRVLLVAFERNDEEVNHIVLQLVFLLQKAKEENDEDKLKTLLKKAIEIARKLLS

SEQ ID NO: 99 - protein, 65 aa, synthetic construct
  REGION 1..65: note = Synthetic
SESEILKHSVSQAAKFLGVPHFEIHDNNGKFTVTVRGPDHVSRMLKLTVRFIAHQLGLDVKVTTQ

SEQ ID NO: 100 - protein, 65 aa, synthetic construct
  REGION 1..65: note = Synthetic
SEEETFKRLVQEWARKAGVPRVFVTTYNNKVYVLIHGNDESAKRLTKIVKKLAKEIGIDVKVQTH

SEQ ID NO: 101 - protein, 65 aa, synthetic construct
  REGION 1..65: note = Synthetic
KVVEQIILFAKFLGNPEVAEIIEKLLRELKERGVSPEEIERIIEELLEELGNETLLRNFRYLLEQ

SEQ ID NO: 102 - protein, 64 aa, synthetic construct
  REGION 1..64: note = Synthetic
DDDKEKKKKVKKKLDSIVEQAKKNPNHAMVLVFRILEEAQKKNDEIVLKIAEEANHKILRIFFK

SEQ ID NO: 103 - protein, 64 aa, synthetic construct
  REGION 1..64: note = Synthetic
SEEDKEHVAMWVIFLATQAAHDEDLERKARKKLDKILKDLKVPEAEEFKKMFDEIVKQVRSMLK

SEQ ID NO: 104 - protein, 56 aa, synthetic construct
  REGION 1..56: note = Synthetic
SEIAEKLLRLAVKAYEKGDRKALRIIARAQIAYAKGEIDPDQARKLAEKAERILRS

SEQ ID NO: 105 - protein, 65 aa, synthetic construct
  REGION 1..65: note = Synthetic
GEELEEIVRELRKRGISPIQILFILMEILFEKGDPVAHLLSQLIFAVAQGDIDPEEALELIIRLK

SEQ ID NO: 106 - protein, 65 aa, synthetic construct
  REGION 1..65: note = Synthetic
TEEYRITIHNRNDSEEEILKKETKAITLIYRILRKAEERGLRAHTRLSRTHRNNTTTFRVTITVQ

SEQ ID NO: 107 - protein, 65 aa, synthetic construct
  REGION 1..65: note = Synthetic
PELVELLIEFVKRYDPELAEKLEENLKRLEEQGVPPEVIIFTLLLAVRAKDEELARRLFELVRRG

SEQ ID NO: 108 - protein, 61 aa, synthetic construct
  REGION 1..61: note = Synthetic
GEKYKEIVKSASRHAKEASKKNDKHLLHMLITFIKTIADTVPDEDVTKYAKKVATKLEQNG

SEQ ID NO: 109 - protein, 63 aa, synthetic construct
  REGION 1..63: note = Synthetic
DDEEVKTWEKLAKEAINRIPDKDTRTEVEKMVRMLIKTAHSPDPTEVALALSLVEQIIREFRG

SEQ ID NO: 110 - protein, 65 aa, synthetic construct
  REGION 1..65: note = Synthetic
TEREAVKESLERAAKLFGVPSVEIDTRNGKVTVTVQGNDEAAKQLSFFAKFLALLAGVDLQVRHR

SEQ ID NO: 111 - protein, 65 aa, synthetic construct
  REGION 1..65: note = Synthetic
DLQEEIKRALKEGDEELVEKLLRELSKRSGAPPALVLNNILVQLEEEGVIPPEELRKILEKFAKK

SEQ ID NO: 112 - protein, 65 aa, synthetic construct
  REGION 1..65: note = Synthetic
DLEEQAQLTARFVAHLVGVESVRVTVRNGKVSVTVTGTDEKAQKASRMIKFALKSFGLDVKVQVR

SEQ ID NO: 113 - protein, 63 aa, synthetic construct
  REGION 1..63: note = Synthetic
SEVSELARWVAANARAVKRRLEDPTKRKKAEKAEKLAKKAGHDPDEELARRLLTHLMMMLIEL

SEQ ID NO: 114 - protein, 56 aa, synthetic construct
  REGION 1..56: note = Synthetic
SQIEKMLRFLTALARHKGDDKARKIVERAIERYRKGKIDPDQARKLAVKAFEILQS

SEQ ID NO: 115 - protein, 62 aa, synthetic construct
  REGION 1..62: note = Synthetic
DEEEEKQKEVDRVFSHARRIPDKEKAQRFVKKYIEEARRRNDPKLVEMLAMVLTMIKALSEI

SEQ ID NO: 116 - protein, 54 aa, synthetic construct
  REGION 1..54: note = Synthetic
SEELASDVLRLALEAGDMEAANRATMIAMALITGDLSDKEAKKLLKKLKKEISS

SEQ ID NO: 117 - protein, 65 aa, synthetic construct
  REGION 1..65: note = Synthetic
DEEEKRVEELLRDPELIERFLAELLEEAVERGDPELNHLVLAVLFALRRGDKDLLKKLLEELIRK

SEQ ID NO: 118 - protein, 65 aa, synthetic construct
  REGION 1..65: note = Synthetic
SLHELVALLWIRVPDPELEREILRVFFAIERGELDPKELARLIEELAKKVGDEEVLELVRKLLEK

SEQ ID NO: 119 - protein, 64 aa, synthetic construct
  REGION 1..64: note = Synthetic
DVRNLLALARTLAEQAAREDSEHARKTIESLSRFVDKLLKNVRTEELKKLAKKVKKTIESLLRK

SEQ ID NO: 120 - protein, 62 aa, synthetic construct
  REGION 1..62: note = Synthetic
DIVEEAHKLLSRAMSEAMENDDPDKLRRANELYFKLEEALKNNDPKTSQEIAKEVVTWAQSD

SEQ ID NO: 121 - protein, 62 aa, synthetic construct
  REGION 1..62: note = Synthetic
DMVEKLTTEAERVATKLERSPDPRNKHVARVIKSAIKQALSDSDKDSATLILFFAVNLARTF

SEQ ID NO: 122 - protein, 64 aa, synthetic construct
  REGION 1..64: note = Synthetic
DEKKELRHLLKIVLELNRKSTDDEARTETQTLAFAAILAEEKGDLELAIRILRKAIKIAEESVK

SEQ ID NO: 123 - protein, 62 aa, synthetic construct
  REGION 1..62: note = Synthetic
DSKEIEELRDKIRKIAKEVQNPRVALAALFVHTLLRHVRAGELDETRATELARAAFRQASQS

SEQ ID NO: 124 - protein, 65 aa, synthetic construct
  REGION 1..65: note = Synthetic
SRLEEALRLLAEVAGLPPEEIRRIFEEYRKEAGDPRAAIFTLLLALRERGLIPPEVLREVIHLVE

SEQ ID NO: 125 - protein, 65 aa, synthetic construct
  REGION 1..65: note = Synthetic
DEELELRALLIIYRILRALEKIHDEEERKRFMEDMIRKFREIFHVEEMIRLFERVLRRAAERAKG

SEQ ID NO: 126 - protein, 64 aa, synthetic construct
  REGION 1..64: note = Synthetic
SEELKKRAEQLIRELKDKARKASRERERFILVALAASLERALKLNDEELLRRIIELIEAQERHQ

SEQ ID NO: 127 - protein, 63 aa, synthetic construct
  REGION 1..63: note = Synthetic
DYRELMSEAVQLILKALSLPDPRAHQRAQRLAFILAHANNVPDETTAKQLIETAWREIQKVLG

SEQ ID NO: 128 - protein, 64 aa, synthetic construct
  REGION 1..64: note = Synthetic
PEYEKIVETLTKQAEEAIRKNDEEKLSRVFELVVRFYEEADESGDPRLRDLAHKLNHRVLRLEF

SEQ ID NO: 129 - protein, 63 aa, synthetic construct
  REGION 1..63: note = Synthetic
EPEEKARTFEELVRKAYKKDPSKAIHLHNRLLWELLEEARRKNDEKLYRLAVELYVKLYRYLE

SEQ ID NO: 130 - protein, 65 aa, synthetic construct
  REGION 1..65: note = Synthetic
TEIERKAHRLAAELFKKARKHNNEELAETALHLTTLLYALERARTEEERKRILEELERFLREWER

SEQ ID NO: 131 - protein, 63 aa, synthetic construct
  REGION 1..63: note = Synthetic
GSVDELSKLVHKLYRIAFEKVQNPEERRKVQFVAFQAHLALKSSDPEEQKKAEELVKTLKKLV

SEQ ID NO: 132 - protein, 65 aa, synthetic construct
  REGION 1..65: note = Synthetic
SLEEEVERLLKEAGVPPEVIELIKELIERLKERGFPPEAILFTIVFLLEELGNPEAARLIFELLR

SEQ ID NO: 133 - protein, 62 aa, synthetic construct
  REGION 1..62: note = Synthetic
DENKDKLRKLKEKVDKASKNKDKDTLTKLWFEAFKLARDVGDPHVIRVVAELAVRIFALIHR

SEQ ID NO: 134 - protein, 65 aa, synthetic construct
  REGION 1..65: note = Synthetic
SEEEIKRAAKLLGVPPEELKRYLRRLLEDAGDPEAVKFTLALAIEKAGLPPEAEELLKKVLEILT

SEQ ID NO: 135 - protein, 62 aa, synthetic construct
  REGION 1..62: note = Synthetic
PPDEYLKTLIRLVHELFTSGDPHKQHLASRVLTLVFQAHLAEDPNEKETLIRKAQKLIKKAG

SEQ ID NO: 136 - protein, 64 aa, synthetic construct
  REGION 1..64: note = Synthetic
SEEEVKQRVTELIELWKKSGDDRFLEEAERILVKFYHEAAKRQDKRLIRTASRLFFKLEEIKRK

SEQ ID NO: 137 - protein, 65 aa, synthetic construct
  REGION 1..65: note = Synthetic
SEEEAIEMAVVSLNQLLSPEAREILKELLKRVKKGDPEATRIISTAFYLARRDPEEATEFIKKLR

SEQ ID NO: 138 - protein, 65 aa, synthetic construct
  REGION 1..65: note = Synthetic
SKEEETTRLYELLLKNPEEFKKEIEELIRKTGDPRLEELLRLIEEALKEGDPFKLIFLVTLLLET

SEQ ID NO: 139 - protein, 65 aa, synthetic construct
  REGION 1..65: note = Synthetic
SKEEEVRELLRLLEEGDPHAAMRLLFLVTEAAGGDPDLANEIYERLLRLLKKNEEEAVKLLVELR

SEQ ID NO: 140 - protein, 63 aa, synthetic construct
  REGION 1..63: note = Synthetic
SEMTRKAIEMILNAAKNTARDPRIQKKIDKVLTKFKEAVKKNDEDKLREVAEQAFELSYQAVT

SEQ ID NO: 141 - protein, 62 aa, synthetic construct
  REGION 1..62: note = Synthetic
NHIACEIHNPEAAKEIAKVANVRRVYFIKQPGNRYFVLLKNADPEGVKKVRSKYNVRCVIRE

SEQ ID NO: 142 - protein, 63 aa, synthetic construct
  REGION 1..63: note = Synthetic
SLDEAKKLLQEAEKLARKLNDRMELAYVEFLKHILETAKKQNDKRTIESVRDMARDALEELQS

SEQ ID NO: 143 - protein, 62 aa, synthetic construct
  REGION 1..62: note = Synthetic
DHWEEVFRWALEHLQEATQQNDPQKAKKILEEAHKWLRRELSEEEARAVVRWLKQLVDRELS

SEQ ID NO: 144 - protein, 61 aa, synthetic construct
  REGION 1..61: note = Synthetic
DRRKEMDKVYRTAFKRITSTPDKEKRKEVVKEATEQLRRIAKDEEEKKKAAYMILFLKTLG

SEQ ID NO: 145 - protein, 62 aa, synthetic construct
  REGION 1..62: note = Synthetic
SETDKVKKVVDTLLTKAKQQQDPELAQEASSFAIEVLNKNPRDETVRELVVKANMVFLQLHS

SEQ ID NO: 146 - protein, 62 aa, synthetic construct
  REGION 1..62: note = Synthetic
DDSEVETAKKLVDEVKKHSNDPRVKFIATAVKLNLDEAKKNNDEERLKSAVEMARVLYKEAM

SEQ ID NO: 147 - protein, 65 aa, synthetic construct
  REGION 1..65: note = Synthetic
DEELVEKAREALRKNDPRAAEVIFRLQIKAMEEGDEEKLRLAVVALWLFAEGDPDKAEKVLSKVP

SEQ ID NO: 148 - protein, 54 aa, synthetic construct
  REGION 1..54: note = Synthetic
SYEEMLKALLKEARKAGVPKAQKIIKKALKLLQEGKLDMDQLTRLMWEAWHLIS

SEQ ID NO: 149 - protein, 49 aa, synthetic construct
  REGION 1..49: note = Synthetic
SSEDIKKTATKAYKKGDYEALFKASYIAWQEGDEDAASYVLRLLWEAAS

SEQ ID NO: 150 - protein, 65 aa, synthetic construct
  REGION 1..65: note = Synthetic
TKELVRKLKELLEKGDPRWESLISKLMMLASELGDPELLHLLNLAYFLYEEGDPRVREVLKELEK

SEQ ID NO: 151 - protein, 65 aa, synthetic construct
  REGION 1..65: note = Synthetic
DEEEIEELLKRAGLLSPKQVESLKEFVRRMKELGISPEEVLEQLLLTLRFIGDEEAVKLLESLLK

SEQ ID NO: 152 - protein, 65 aa, synthetic construct
  REGION 1..65: note = Synthetic
SRRELFQRNVEKIAKSAGVPSVEVRYTNGKYHVHLHGDNRELKIAKNQVELFAMFANLDVKVTTH

SEQ ID NO: 153 - protein, 63 aa, synthetic construct
  REGION 1..63: note = Synthetic
DRHQEFIRLIWETLRISRENNNEESHHLAAEAFLIWARALQNNIEEELKKAEEIAEKSLRLAR

SEQ ID NO: 154 - protein, 65 aa, synthetic construct
  REGION 1..65: note = Synthetic
DAVEQAELFLRFMNSPVAREILKVLKELKERGVSPEEILRLLTEVAEKLGDPQLARNLRFFLEID

SEQ ID NO: 155 - protein, 60 aa, synthetic construct
  REGION 1..60: note = Synthetic
SEHVLKNIKKVVEHFTKEIPDSKQAREQAKLFIRFALRHIEDPDERRKVEEEATKLVQKI

SEQ ID NO: 156 - protein, 65 aa, synthetic construct
  REGION 1..65: note = Synthetic
DEIYRELFRLAEELNDPELLMLLLTAAFMLSHGNPDVERLLKRVLEVLEKGDPEEAKKLLKKLLK

SEQ ID NO: 157 - protein, 56 aa, synthetic construct
  REGION 1..56: note = Synthetic
DEIEEKLARLLWRALELGDDEAARLALEAQRLVARGEIDPSQAKKLAKKLEKLVRS

SEQ ID NO: 158 - protein, 64 aa, synthetic construct
  REGION 1..64: note = Synthetic
DPRKKLKELVQRALRLAKEVGDEEILTLVFALHLAAERAIKNNDEDTLKRVEELLKRAIKKLES

SEQ ID NO: 159 - protein, 61 aa, synthetic construct
  REGION 1..61: note = Synthetic
SEEEKKELEELVRRAEEALKRNDDERVKEVLQRLYELAARLEDREILHFVNRIHFKLYEKE

SEQ ID NO: 160 - protein, 65 aa, synthetic construct
  REGION 1..65: note = Synthetic
DRELAHLLLEAAERNDPKLNQLVLVAFFLLERGVPPEEIERLLRELAEELGVPPELLERITRVVR

SEQ ID NO: 161 - protein, 65 aa, synthetic construct
  REGION 1..65: note = Synthetic
PLEEELEKALKEGDPDKLHRLLTRLMMEASRRGNKEELRLINIIYFAIEEGNPEMAEKAIKLLQK

SEQ ID NO: 162 - protein, 65 aa, synthetic construct
  REGION 1..65: note = Synthetic
DELINEIIQLAVKDPEKAKELIKEIVKELRKKDPRLVKEFLEQLLLTLRFLGDPELVKLVEKLLR

SEQ ID NO: 163 - protein, 60 aa, synthetic construct
  REGION 1..60: note = Synthetic
SPEEVLLELARKHNIEQAIQLLWLAAARDEELYKHVEELVRRNLEHVIVEQAKELLDRAR

SEQ ID NO: 164 - protein, 61 aa, synthetic construct
  REGION 1..61: note = Synthetic
DKEAIENYIRLLKRETENLSDEELARQIRKKLKKAEELLRRGLEEEANELLLRIYFELRRR

SEQ ID NO: 165 - protein, 65 aa, synthetic construct
  REGION 1..65: note = Synthetic
SFEELAKEYKRTGDPRYLALLFQLLFELQFETGDPRLTRLIWMLMEAMKRNDPDLVEKLARLAEK

SEQ ID NO: 166 - protein, 65 aa, synthetic construct
  REGION 1..65: note = Synthetic
TELLERVVRLVKEGDPEKAEELLARLYLRLAREGDPETLRFVIAVFLALARGNPDEAEKVVRQLK

SEQ ID NO: 167 - protein, 55 aa, synthetic construct
  REGION 1..55: note = Synthetic
SVVEKAFRAAYLALNKGDEKAVREAQRALFLYYRGEADKNQLDKIIETIIRRLRS

SEQ ID NO: 168 - protein, 65 aa, synthetic construct
  REGION 1..65: note = Synthetic
DLEELVRELLERNPEFKRLLEELREAEEEGDEELVTLLRLTLALALAEFLNIPPEEARKALELLT

SEQ ID NO: 169 - protein, 65 aa, synthetic construct
  REGION 1..65: note = Synthetic
SLDRALAAALERARELGDPRVNHIVLQIIFELRHGVNPEELERALVERLRQVNPEVARLVEELLK

SEQ ID NO: 170 - protein, 64 aa, synthetic construct
  REGION 1..64: note = Synthetic
TTEEISKEIYRKAWKLAESVPDPHLREKAERVILTLSLMVLLIPNPEEAKKLAKKLEEIVRKIV

SEQ ID NO: 171 - protein, 65 aa, synthetic construct
  REGION 1..65: note = Synthetic
SVEEILEELSKKLKDPRIEEVRERLEEIVRRLNVSPIIAAFILSFELFERGDPRASIVVTALFLA

SEQ ID NO: 172 - protein, 64 aa, synthetic construct
  REGION 1..64: note = Synthetic
PPSQEFFLRLVEKVVKKAKQIPDPRSQKIAKRLEELVKRARQVEDPKEKLHLVAVAAFLAAKVV

SEQ ID NO: 173 - protein, 63 aa, synthetic construct
  REGION 1..63: note = Synthetic
SPEDEKLREELKRLYKIIKNVEDPKEATKIWFRAMEIFFNVTDPTLQTLARLVNHLALRVFLR

SEQ ID NO: 174 - protein, 65 aa, synthetic construct
  REGION 1..65: note = Synthetic
SREEAIQKSVEHALKFLGVPSFSVSISNNTLKVTVKGDDSAARMAEFSVKSIAMLAGVPVEVRLK

SEQ ID NO: 175 - protein, 65 aa, synthetic construct
  REGION 1..65: note = Synthetic
DKEELIEEAIEKLAPSPEAERYLREALKEFKELGNPEAFLFLLWFAAKRLGNPEVERLVRELLRR

SEQ ID NO: 176 - protein, 65 aa, synthetic construct
  REGION 1..65: note = Synthetic
SRDELLRRNVEFLARVAGIPSVSVTVENGTVKVKVKGNDERAQFFSEQVKLFARFIGIPVQVDLR

SEQ ID NO: 177 - protein, 65 aa, synthetic construct
  REGION 1..65: note = Synthetic
DRTEAARKAIDRAAKWFGVPSWSVDVRNGTLHVKIDGTDYSVKQLSFFAKFLAQLVGLPLKVDVR

SEQ ID NO: 178 - protein, 64 aa, synthetic construct
  REGION 1..64: note = Synthetic
PEEEEIETRARKKATHVVEVAKKNPEKAKRLIARLLVEAMEKNDHILNHVVNHAYFLIEEVERS

SEQ ID NO: 179 - protein, 65 aa, synthetic construct
  REGION 1..65: note = Synthetic
DRTETARRSIDRAAKWFGVPSWSVDVRNGTLHVKIDGTDDSVKELSLFARFLAHLVGLPLKVDVR

SEQ ID NO: 180 - protein, 61 aa, synthetic construct
  REGION 1..61: note = Synthetic
DEHKELKELYDHILKLLRNAKTEEEVQELARKSVQLAELLNIEELVQESLLLWLRLHNRLK

SEQ ID NO: 181 - protein, 51 aa, synthetic construct
  REGION 1..51: note = Synthetic
SIEEEILRWIMLAHKLGDPTLQSLAIEASHAYWNGDKKKARELIKKARKWY

SEQ ID NO: 182 - protein, 65 aa, synthetic construct
  REGION 1..65: note = Synthetic
SEEYRKKLREAVELGDPELVAQLLLTLAFLTGDPRLQELFSMLSELIFRGDPSLEEILKLVKELG

SEQ ID NO: 183 - protein, 62 aa, synthetic construct
  REGION 1..62: note = Synthetic
DEEEEKEKEVHKVLQTALRIPDKEKAQRFVKKYIEEARRRNDPKLEHLLRYVLMVIKKFSDT

SEQ ID NO: 184 - protein, 65 aa, synthetic construct
  REGION 1..65: note = Synthetic
SFLETLKHLAEYLGDPELRKLLERLEELLKRGVSPEELLRIALRVARELGNPMFALTVEYLLHVP

SEQ ID NO: 185 - protein, 62 aa, synthetic construct
  REGION 1..62: note = Synthetic
SDEKVKEALKEVEKAVKKAGLDPKVVEWAERAAKEMKRRGISDDQISLFLRFVVELIRKNSS

SEQ ID NO: 186 - protein, 65 aa, synthetic construct
  REGION 1..65: note = Synthetic
SEELVERAKRLAGGDPRRALYLLLLALARRLNLPPRELAKILQKLRREAGGDPELLLKLLAELVE

SEQ ID NO: 187 - protein, 55 aa, synthetic construct
  REGION 1..55: note = Synthetic
NYERVIAHAARLAAELGDREALRRLNEIFFGAREGRIPPELAERLARRIEKKLRS

SEQ ID NO: 188 - protein, 65 aa, synthetic construct
  REGION 1..65: note = Synthetic
SLLSKIQELLERGDPEKVEELLRRLVELLRRDPDNEHLAMLLMQAVTIVAGGDPERANELFKRLR

SEQ ID NO: 189 - protein, 65 aa, synthetic construct
  REGION 1..65: note = Synthetic
DEDEQVRLTVLYVAHLAGVPSVEVDRSNGRFTVTFDGDDDSARTASKTVKRMLTKMGLEVDVKTR

SEQ ID NO: 190 - protein, 64 aa, synthetic construct
  REGION 1..64: note = Synthetic
DPKEEAKKVTRLLLKLAVNADDDEIRVELVTLAYALKRALERNDEEALKRVISKARKFIKDVKS

SEQ ID NO: 191 - protein, 65 aa, synthetic construct
  REGION 1..65: note = Synthetic
SKEEWFSLAVKVSARYAGVPDVKVRVSNGRFEVTINGDTDSARLAQQMVRDLAEIMGVEVDVQVR

SEQ ID NO: 192 - protein, 65 aa, synthetic construct
  REGION 1..65: note = Synthetic
SEEEIREIIETWKKDPKKAHRLVNRLLFEAYERGDPEKQSVAIRAAYLLYEGNPEEAEEVLKEIQ

SEQ ID NO: 193 - protein, 65 aa, synthetic construct
  REGION 1..65: note = Synthetic
DLEELLEEALREAGFPPESIERAKRRVEELLRRDPREAAKFVALFLQFVGNPELLKKVREIFEKT

SEQ ID NO: 194 - protein, 64 aa, synthetic construct
  REGION 1..64: note = Synthetic
PEEADKILEHLQKLFREALENRDEEAIAFIATLYLAAARAKRNNDQEALERVKKLLKEFKERKK

SEQ ID NO: 195 - protein, 65 aa, synthetic construct
  REGION 1..65: note = Synthetic
GEEEALKILAEVLGRPPEEIRKLVEKIARELRVPPEHAIKHLALTIAFRLNDPRVLRLIAEALEK

SEQ ID NO: 196 - protein, 65 aa, synthetic construct
  REGION 1..65: note = Synthetic
SEEERIKTSIERAAKWFGVPSFDIQTRNNRIHVTIDGDDDSARQLKLFIRFLAEVNGVQVHVTIK

SEQ ID NO: 197 - protein, 65 aa, synthetic construct
  REGION 1..65: note = Synthetic
SLVEAVIEQVEKRGFPPEVLVATVWLALEKAGDPEKARLVQELAREVFRGELPPEELKRLLREIE

SEQ ID NO: 198 - protein, 64 aa, synthetic construct
  REGION 1..64: note = Synthetic
SDDMRVLALAVSLMMFAQKQNDEKVEKTAITLWVQLMDARLRNDEETTDKISKLIKDLATKLKS

SEQ ID NO: 199 - protein, 55 aa, synthetic construct
  REGION 1..55: note = Synthetic
DVEQLLLRYAWRALELGLEEHAVFIFRLLALVAKGEIDEREAHKLLEESRKRLEN

SEQ ID NO: 200 - protein, 65 aa, synthetic construct
  REGION 1..65: note = Synthetic
SEEAIRMLQSLFKTDPEVQAQFLEVLIEHRVPDPEERRRLKETLKEIVERNDEELFERLVEEVLR

SEQ ID NO: 201 - protein, 64 aa, synthetic construct
  REGION 1..64: note = Synthetic
PKEEEIKKLLKKLIKLAKELSNTPEARRMVKALERTVKELVKKTSPEDALKFAALALVSIEYIS

SEQ ID NO: 202 - protein, 49 aa, synthetic construct
  REGION 1..49: note = Synthetic
NSEEIKKEIKKAEKKGDSQKLLQLLWLAIELGDEEAAVFALEAQSRVMS

SEQ ID NO: 203 - protein, 64 aa, synthetic construct
  REGION 1..64: note = Synthetic
DEELKKQAEKLARLLVRLAAEVPNEEIALELITLAYALERASRNDDDERLKKVIDTAKEVVSKG

SEQ ID NO: 204 - protein, 61 aa, synthetic construct
  REGION 1..61: note = Synthetic
REEKIERLVREAERRIREGKISAQEVFEVQHRVYELLRKKGDPRVEKLLHKIMRLLWMLAK

SEQ ID NO: 205 - protein, 56 aa, synthetic construct
  REGION 1..56: note = Synthetic
DEIERKLLKLSIIAWELGDQKALNLAASALFAVVAGEIDPSQAKKLAKKLEKLVRS

SEQ ID NO: 206 - protein, 65 aa, synthetic construct
  REGION 1..65: note = Synthetic
DKEELIEEAIEKLAPSPEAERYLREELKEFKELGNPEAFLFLLWLAAERLGNPEVKELVRRLLRR

SEQ ID NO: 207 - protein, 65 aa, synthetic construct
  REGION 1..65: note = Synthetic
SEQDVVRKNAERILKLVGVPHYEVSKSNGTVTVTVKGDDERARLALNQVKLFAMFLGVNVQVRIK

SEQ ID NO: 208 - protein, 65 aa, synthetic construct
  REGION 1..65: note = Synthetic
PAEEILRELLHRDPRDKVVVLLLYALLRAREEGRFSPEELIELLVRLARRAGNPELAKLLERLLR

SEQ ID NO: 209 - protein, 63 aa, synthetic construct
  REGION 1..63: note = Synthetic
NEERRRAIERILTRAKKLARDPRIQKKIDKVLTKFKEAVKKNDEEKLEEVLILATTLWLRAHK

SEQ ID NO: 210 - protein, 63 aa, synthetic construct
  REGION 1..63: note = Synthetic
KDELTEHVLKQLRQVLEEIRDYDRVREAAKLLAEFFRELDPRAEEAAKKALKIFEEELRKKQG

SEQ ID NO: 211 - protein, 51 aa, synthetic construct
  REGION 1..51: note = Synthetic
SLEDINRLIFIAHKLGDDKALRVLSHALMAWEKGDEELARKLVKKARKLLS

SEQ ID NO: 212 - protein, 63 aa, synthetic construct
  REGION 1..63: note = Synthetic
TEEIKRAVKHSVKDMVKNGLDPEWAVRVIRTFLEEMIRQGKISKEEAKEATKVAEKVAKKAKG

SEQ ID NO: 213 - protein, 55 aa, synthetic construct
  REGION 1..55: note = Synthetic
NFFHVVWRAQRIAMKKGDEKALSILARIAMEAAQGKLDPTKAERLARRIEKKLRS

SEQ ID NO: 214 - protein, 64 aa, synthetic construct
  REGION 1..64: note = Synthetic
DHEEKAVRLLWAILEVAEKKDDEKLHHLVAQLYEQLVEAAERNDEDSLKEITKKIEELLKKASS

SEQ ID NO: 215 - protein, 61 aa, synthetic construct
  REGION 1..61: note = Synthetic
DDHKEVIQSMLKSALRELKQYARDDSIREKVERLATEASRKNDHHLANRVLFLIVKLIKDS

SEQ ID NO: 216 - protein, 65 aa, synthetic construct
  REGION 1..65: note = Synthetic
STVSREVLTIHTSNPEEVKKWKKEAQKRAEKIAKKYRKQGLDVKVHTFEVRRGDTVIIIVEVRIN

SEQ ID NO: 217 - protein, 63 aa, synthetic construct
  REGION 1..63: note = Synthetic
IEEAKKLAMLVSMAAQMLAEGRLDERKWKKIVKEASKILKKLGISEEEIRNFQKSAKELKKQF

SEQ ID NO: 218 - protein, 65 aa, synthetic construct
  REGION 1..65: note = Synthetic
SEKEEFIIENVKKLGDPNQIELFIAFAVKLSGDPRLKELLEIVKELIERGVSPEEILRIIEEFLK

SEQ ID NO: 219 - protein, 65 aa, synthetic construct
  REGION 1..65: note = Synthetic
SDRVAQFLLFLAFQTGDPRLRILFSVVVRLEEEGVSPEEIKEILEKVAKELGNEEVIREIKKLLD

SEQ ID NO: 220 - protein, 55 aa, synthetic construct
  REGION 1..55: note = Synthetic
SEIANEIMRVLWEALERGDEELALKALHVSHLLWTGEIPDEEAKKLAEKLKKLLS

SEQ ID NO: 221 - protein, 63 aa, synthetic construct
  REGION 1..63: note = Synthetic
DEREHARQRIEFLSALAQQIRRDEALEKAIRLMEELARWAGIEDIERLVEEAIRRSRRAVKRF

SEQ ID NO: 222 - protein, 55 aa, synthetic construct
  REGION 1..55: note = Synthetic
SEAERLLSHLARIAAEKGNEKALHVVNRAIIALIEGLADEKQIRKLLKKAKSLLS

SEQ ID NO: 223 - protein, 60 aa, synthetic construct
  REGION 1..60: note = Synthetic
DKEEKITEFSQKLKEKVEKASEEEAERLIAKAYHEAMQRNDPDLALVILRVMFEFREKRS

SEQ ID NO: 224 - protein, 65 aa, synthetic construct
  REGION 1..65: note = Synthetic
DEEEAERLLAKLLRKARSPEERRLLTAVFFALREGDPETARRIVEELLRRVGDPELKRVLELIEK

SEQ ID NO: 225 - protein, 65 aa, synthetic construct
  REGION 1..65: note = Synthetic
SSSQRYQIRVDSSDPKDTEQAHRDAKTIAQRYAEELRRQGNPVSYDLNYHRLNNLWMVVVHVRTK

SEQ ID NO: 226 - protein, 62 aa, synthetic construct
  REGION 1..62: note = Synthetic
KEWRDKLKSRLETVVKKAQKDPSYEEEAERVISEAMSIAMEEHDPEALHEANKAYFELHEYM

SEQ ID NO: 227 - protein, 63 aa, synthetic construct
  REGION 1..63: note = Synthetic
PEEDEEFLKAAFRTAQEALKEGDKRRAEFIIAAAELYARHLDVEELKELAKELSEQFKEEVKR

SEQ ID NO: 228 - protein, 64 aa, synthetic construct
  REGION 1..64: note = Synthetic
SEEQRKLAEKLLSKAQEALKKNDTETLEKVVRRVLEIALKYDENPYIHKVAIDASLLWLMAAER

SEQ ID NO: 229 - protein, 63 aa, synthetic construct
  REGION 1..63: note = Synthetic
SRDEQFKKLVKDVKTLAKRQNDEEVLKAVERATKLFREAKKKNDEEKALRAWFALAIALEKLS

SEQ ID NO: 230 - protein, 65 aa, synthetic construct
  REGION 1..65: note = Synthetic
DELREILREALEKGDPRLVLQLLALLAFLAHRTGDPRLVKVYFIVAEALDKKDPELLKKALKLLK

SEQ ID NO: 231 - protein, 60 aa, synthetic construct
  REGION 1..60: note = Synthetic
SPEKVLLELARKHNIHQAIQLLWLAAAKDEELYKHVEELVRRNLEHVIVEQAKELLDRAR

SEQ ID NO: 232 - protein, 65 aa, synthetic construct
  REGION 1..65: note = Synthetic
SEHEAATESIKQAAKTIGVPHVEVDTRNGTLKVRIKGDDDAARMLQMSVKSVARLANLKVDVRTE

SEQ ID NO: 233 - protein, 55 aa, synthetic construct
  REGION 1..55: note = Synthetic
DVEKLVKEVEKLARKRGDRRAAFIARAILAAFRNGKLSSEAAERALKKLAKRLKG

SEQ ID NO: 234 - protein, 62 aa, synthetic construct
  REGION 1..62: note = Synthetic
EELKKILTELKKKATKALRNNDQSKVQHVIMVLAEIIHKAQTPEVRRTAAKLAFTLMRLTIQ

SEQ ID NO: 235 - protein, 65 aa, synthetic construct
  REGION 1..65: note = Synthetic
DFTIHVQSEARWTVEEERRRALRWFARVSTRARRVADRLNVDVEFHVEHRFHGEKVVIRIVVHFR

SEQ ID NO: 236 - protein, 64 aa, synthetic construct
  REGION 1..64: note = Synthetic
SEDDEKVSEIFLRAYEIALKKNDPDQLSELNRWAFLFVEAQQRNDEELVKRLAKKFEEWVSKAQ

SEQ ID NO: 237 - protein, 61 aa, synthetic construct
  REGION 1..61: note = Synthetic
DEEAKYVHLMVFSLRYYAKQAKDPTLAKQIKELADKAERDNDPETVREALKVVTKAQKKSH

SEQ ID NO: 238 - protein, 61 aa, synthetic construct
  REGION 1..61: note = Synthetic
DYQKVNKLLDKATEIARKQNNPDVVFILVALKLSIEWAVKENDEEALKQLEHIASRFAKKF

SEQ ID NO: 239 - protein, 64 aa, synthetic construct
  REGION 1..64: note = Synthetic
PELDRMVHMAQRIADKIVKKASNPEIQKKAKTVKKLLEEARQKKDDETVIRLLMIAELLFLSVF

SEQ ID NO: 240 - protein, 62 aa, synthetic construct
  REGION 1..62: note = Synthetic
DDLKEKAKTLLELVKEASKKNDQKTLRELSLELVAVFMEAQDPNVRHLVEKAYFIAMELAFK

SEQ ID NO: 241 - protein, 62 aa, synthetic construct
  REGION 1..62: note = Synthetic
SKEFVDSLLKHVEKLAKEVPNPEAKKILTKIKRLLEEANRRNDEAKAYLLVFTAWHQIRQLK

SEQ ID NO: 242 - protein, 55 aa, synthetic construct
  REGION 1..55: note = Synthetic
SFMSVIQRAINLAMKNGDEKAMNILLRIQFLALQGKMSEEQAEKRARRIEKKLKS

SEQ ID NO: 243 - protein, 65 aa, synthetic construct
  REGION 1..65: note = Synthetic
SEEEHVRKVIETMAKRFGVPDVKVSVRNGTVHVKVRGTDDAARQARLTAMFFAHLLGVPVSVTIR

SEQ ID NO: 244 - protein, 64 aa, synthetic construct
  REGION 1..64: note = Synthetic
DEKVAVKVLVVAFRLWDKTGDDSARKAILYASRVFMAAMNGDLSEKDRKKLEKTLRKIEKKLRS

SEQ ID NO: 245 - protein, 61 aa, synthetic construct
  REGION 1..61: note = Synthetic
STIEFAISVAKFYLEELRKLGLISDEEAKRIKEELDELLRRGDERRVSQILNTLVELVVRG

SEQ ID NO: 246 - protein, 61 aa, synthetic construct
  REGION 1..61: note = Synthetic
SEEKAKELVEALKRRVEEAGDEELKKRIEKLVQEARKKGLSWEEIATLVFTLILAFETKKK

SEQ ID NO: 247 - protein, 62 aa, synthetic construct
  REGION 1..62: note = Synthetic
DAVERLERQVEKLVKEVTNSGNPNSERAQRLLKLLKELLKKATSKEEQALAALTIALAVANA

SEQ ID NO: 248 - protein, 65 aa, synthetic construct
  REGION 1..65: note = Synthetic
SLQEQLERIIKTIAKRAGVPQVKVRLRNNKVEVTVDGANQAAALVHLAVVRVARRLGLDVHVRVK

SEQ ID NO: 249 - protein, 63 aa, synthetic construct
  REGION 1..63: note = Synthetic
TTQETLVKSMIKQLKDVADNRDDPTVKKTLKTLAKILEKALKNNDMSAINRALFLAMEVLKSG

SEQ ID NO: 250 - protein, 50 aa, synthetic construct
  REGION 1..50: note = Synthetic
SSKELKKRIEKAEKTGDVHKVMELALIAFMRGDQEAARLANRALFRLYNR

SEQ ID NO: 251 - protein, 61 aa, synthetic construct
  REGION 1..61: note = Synthetic
SQDRREDAKEIIKELVKIGNEIDARSVLMFLAYEISEEEGLDEDQASEVLQELHEVLERLL

SEQ ID NO: 252 - protein, 64 aa, synthetic construct
  REGION 1..64: note = Synthetic
NWEELVKRAQTLIKRAQDTGDKSYVNEAWSVANVAAFLAVELNDPEVQHIVSKLLEQIITVADS

SEQ ID NO: 253 - protein, 65 aa, synthetic construct
  REGION 1..65: note = Synthetic
SKEEVVERAVRLLEEGNPFEASILIQMFLLRLGISPHEIVELINRFMELFKRDPEEAKRFLREVG

SEQ ID NO: 254 - protein, 61 aa, synthetic construct
  REGION 1..61: note = Synthetic
PHVEELVKTLVSKAEEAIRKNDQETLSRLIETLFELQKKDPRFRDAAAVALLLIAELQESN

SEQ ID NO: 255 - protein, 60 aa, synthetic construct
  REGION 1..60: note = Synthetic
DLREEFQKVVKKAQEAAKNKDHEKAIRLVWRALEIARKIGDEELERQVARVLLQVHELLR

SEQ ID NO: 256 - protein, 53 aa, synthetic construct
  REGION 1..53: note = Synthetic
SREEAVELYHIAVEKGNEEAARIAAAVYLGLARGELDEDEARKLLEKVKKLLS

SEQ ID NO: 257 - protein, 63 aa, synthetic construct
  REGION 1..63: note = Synthetic
DEELKRAAKSMLDQAKKLADQISNDDLRKKAQSLVEKARKIDDPTVALTVAFTVRTIYEEVQS

SEQ ID NO: 258 - protein, 63 aa, synthetic construct
  REGION 1..63: note = Synthetic
DYREALRLLMAILELSERRNDEESHHEAARAYNHLSRARERNDEEAIKEVVEQLREQLERIEG

SEQ ID NO: 259 - protein, 62 aa, synthetic construct
  REGION 1..62: note = Synthetic
PERLRELLEESLRLAEERGDEELVNRTILLAFAFEIAKRRGDEERLKHLARLIEELWHENRN

SEQ ID NO: 260 - protein, 61 aa, synthetic construct
  REGION 1..61: note = Synthetic
SEEDKIQTLIDEVRKAAKRLYPDDEEVKKIESNAQELVDQAQDQELAKLSLRFLKHLLDSE

SEQ ID NO: 261 - protein, 62 aa, synthetic construct
  REGION 1..62: note = Synthetic
DISQELSKIVKSLIDELKKSPDPKDKHAAELAESAWRQAEEAQDPHERALILFFAISVVRNT

SEQ ID NO: 262 - protein, 65 aa, synthetic construct
  REGION 1..65: note = Synthetic
SRDELLRRNVEHLARLAGIPSVSVTVENGTVKVKVKGNDERAQFFSDQVKLFARFAGIPVQVDLR

SEQ ID NO: 263 - protein, 64 aa, synthetic construct
  REGION 1..64: note = Synthetic
DDDKKEARKEAALFAQAVRQGRLDKRAAKEAVRRRIKKARKSGDERLAKILELVLKLLDKILRS

SEQ ID NO: 264 - protein, 56 aa, synthetic construct
  REGION 1..56: note = Synthetic
DEILHKLARLLWRALELGDEKALKLALEAQKAVARGEIDPSQAKKLAKKLEKLVRS

SEQ ID NO: 265 - protein, 61 aa, synthetic construct
  REGION 1..61: note = Synthetic
DEEERFREHLRRQLHELLRTDLRAAWIFVAYALERAKENNDELARKIAEELMREIEELIKN

SEQ ID NO: 266 - protein, 65 aa, synthetic construct
  REGION 1..65: note = Synthetic
GPEEFIELYRRWLKLGLSPLTIANVILFAAYERNDPDLIRAAAIFMLLIQRFDPEEALRLLQELG

SEQ ID NO: 267 - protein, 62 aa, synthetic construct
  REGION 1..62: note = Synthetic
DIEEFIETFLRSHNEDLRRLGTWSEEELKELTKLLRKLAEELDDEREIKNLLILIAFRSQLK

SEQ ID NO: 268 - protein, 61 aa, synthetic construct
  REGION 1..61: note = Synthetic
DEQELVKKVKTILTEASKKNDKEKVREALSLATRVMLHAKDAKVFEQLFKLELYALHVIKS

SEQ ID NO: 269 - protein, 65 aa, synthetic construct
  REGION 1..65: note = Synthetic
TRDELTKKNIEKLAKIAGVPSVKVTRSNGRWKVTFSGDDEAARDASNQILLFARFANLEVELTLK

SEQ ID NO: 270 - protein, 54 aa, synthetic construct
  REGION 1..54: note = Synthetic
NLERKLVRLYNEAVKLGDKDLMSRAVAVFFLIEDGRISDDDIRKLVEEVERLVR

SEQ ID NO: 271 - protein, 60 aa, synthetic construct
  REGION 1..60: note = Synthetic
DEEAFKIIFKLTVTVNKLLRKNPEQAKEFVKRVLKEAKEKNDHRTYMAAKAILRLIKEHG

SEQ ID NO: 272 - protein, 62 aa, synthetic construct
  REGION 1..62: note = Synthetic
PEDDEVFHTLVRVLWKAAEDGNSEVFEKAFRLQFLFMEAKKKNDEETLKKVITKAKKVIKKQ

SEQ ID NO: 273 - protein, 63 aa, synthetic construct
  REGION 1..63: note = Synthetic
SEEEHRKKLETELRKIREALKREEEAKKTKKWLRRLFREAVEKRDEELARLAALLYLAFERLR

SEQ ID NO: 274 - protein, 65 aa, synthetic construct
  REGION 1..65: note = Synthetic
ARRYTLTVRVPTGDPTETKKAEKRAKKFATDVSEKWKRNGYTVRFRVDVLRNGDRISVIVIVIIK

SEQ ID NO: 275 - protein, 63 aa, synthetic construct
  REGION 1..63: note = Synthetic
DLKKLVSRVVENLAEEIKKQASPDEQKKLDTLLEQLKKALKNDDESTASKLWMIISEIWVRLR

SEQ ID NO: 276 - protein, 65 aa, synthetic construct
  REGION 1..65: note = Synthetic
DEILEEIEEALRRGDPDLVERLISKLMLLAAELGDPKLLHAANRLYFALKKSPELVKEILEEVRK

SEQ ID NO: 277 - protein, 61 aa, synthetic construct
  REGION 1..61: note = Synthetic
SKEEKMKEAALRLTLIAQRLGVDRKYMHTAVRIFVKLVKNGVDLDQARRIAEKWLKKVVKS

SEQ ID NO: 278 - protein, 65 aa, synthetic construct
  REGION 1..65: note = Synthetic
TITFSNTIILNGNSERVQKWAEEWLEEWRRKLSELAKRLGLEIKHRIHRERDGKFIVIRIRSRIK

SEQ ID NO: 279 - protein, 61 aa, synthetic construct
  REGION 1..61: note = Synthetic
DESKKILDHLKTLLEKAIKNNDTETLNHLVLHLFFLARELNDEEAEKVAVEAYEVVHRLLR

SEQ ID NO: 280 - protein, 59 aa, synthetic construct
  REGION 1..59: note = Synthetic
PIEEEVKELIKIVEEALKNNDRETVSKVLFRALRLAVEVNNEELISRVNRLAFIAFTVT

SEQ ID NO: 281 - protein, 65 aa, synthetic construct
  REGION 1..65: note = Synthetic
DEEIEKLLEEVIGDPRIAREVLELFKELRKRIDPKEVLMMIIVLLNRLGVSPEVINLVLKILLLP

SEQ ID NO: 282 - protein, 62 aa, synthetic construct
  REGION 1..62: note = Synthetic
DWREYSKKLKKALKRAAKDPHDAEAYHEIFRILLALEEIVPDPRIAEKLAQEASKQAREEVR

SEQ ID NO: 283 - protein, 59 aa, synthetic construct
  REGION 1..59: note = Synthetic
SEETKRIKKWAKKLAKKAGLDEEIIKQAQKNVEELARQGFSPEEIKTVIKQLIWLAKKR

SEQ ID NO: 284 - protein, 65 aa, synthetic construct
  REGION 1..65: note = Synthetic
DEEVLLELLQRTGDPRVLFILFLLKLLKEKGIPPEEALKIVEELIKELGDPEAERLLEIVRRRLP

SEQ ID NO: 285 - protein, 63 aa, synthetic construct
  REGION 1..63: note = Synthetic
DPTHILLEISLLAQELLRRGIDPRKAVKIVKKILSKLIKEGKISPDEAKEALKMAKDVAKLLS

SEQ ID NO: 286 - protein, 50 aa, synthetic construct
  REGION 1..50: note = Synthetic
DSEKLKEKVKKALKKGDVQALFEVVELAMELGDQELANLATKALMILAKR

SEQ ID NO: 287 - protein, 55 aa, synthetic construct
  REGION 1..55: note = Synthetic
DVRKLLKEIIEIARKQGDERAVFIAAALLAATEQGFSSEENSREAAERLFERLRN

SEQ ID NO: 288 - protein, 62 aa, synthetic construct
  REGION 1..62: note = Synthetic
DELEKKVEKLAREAMQAVDNGDKDKVNTLVTELKKVVKSQPDNPAAEFAALAITMLEYLIKH

SEQ ID NO: 289 - protein, 63 aa, synthetic construct
  REGION 1..63: note = Synthetic
IEEAKKLKDKVRKAAEKLSQGRLDERKWMKIVTEAMKILAKLGISEEEIMHFSMQAYELKKKA

SEQ ID NO: 290 - protein, 61 aa, synthetic construct
  REGION 1..61: note = Synthetic
SKKEEAKEAIKALRRMAKWLGVDEKYIRTASEIFKKLVKNGVDLEEALNFASIWLMQVLES

SEQ ID NO: 291 - protein, 64 aa, synthetic construct
  REGION 1..64: note = Synthetic
SEETKKLQKKVREILKKAKSGKIDPHKALSLVMEILAKAMEKGDKKVLSEANRAAFKLIELESS

SEQ ID NO: 292 - protein, 55 aa, synthetic construct
  REGION 1..55: note = Synthetic
DVELMAETAIKIARKKGDEKAVRILEKIAKLFRKGLIDEHEALRRINHIYFRLMK

SEQ ID NO: 293 - protein, 64 aa, synthetic construct
  REGION 1..64: note = Synthetic
DEVEEELKKIAEKLSEAIRKNDEDKVEHLKEALINAAFRASHKYDPTRVQRIYRKVMRLAEKLG

SEQ ID NO: 294 - protein, 65 aa, synthetic construct
  REGION 1..65: note = Synthetic
SIVEELEELLRRGEVDPERLVARFWFLLVREGDPHKALKAISLFMALKRGEIPPDEAVELLREIE

SEQ ID NO: 295 - protein, 65 aa, synthetic construct
  REGION 1..65: note = Synthetic
TIRVTITWRVDAHNEDENRHSRRLAEEVREEAEEIAHRLNRRLDLSITVVRFGDKVVTIVFFTIQ

SEQ ID NO: 296 - protein, 63 aa, synthetic construct
  REGION 1..63: note = Synthetic
TREILNKVVEIVLKLVKKGVDPEQAVKIIRKILSELIRQGKISKDEARMATLTARFVAHLAKG

SEQ ID NO: 297 - protein, 63 aa, synthetic construct
  REGION 1..63: note = Synthetic
LVIIVFYNVDPRLVKKFAKLIGAERITLFRFGQSVILFVKDASPELVKKAKKIVKPNRVTVRH

SEQ ID NO: 298 - protein, 65 aa, synthetic construct
  REGION 1..65: note = Synthetic
SVEEVVEEAKRRGELPPEVLALAYLAIFRAKERGLPPEDVARYVEKTARELGDKDLEELAKKLKK

SEQ ID NO: 299 - protein, 61 aa, synthetic construct
  REGION 1..61: note = Synthetic
DPKKLDELRKKIETFLRKATDPDARMAAYFALNAAEKALKDQDPLAERAARAAYRQAKKAQ

SEQ ID NO: 300 - protein, 61 aa, synthetic construct
  REGION 1..61: note = Synthetic
DKDKKIKDIVKTLVSRAKKDPRQAEEALRIVALLYLRAQREGDEHAAKLLRKALRLIHEAR

SEQ ID NO: 301 - protein, 63 aa, synthetic construct
  REGION 1..63: note = Synthetic
SEEERKEEAIRIFIRYALKRAKSEEEAKEALEAIWRRAEKKNEEETLKLLKEALKRIEEKEKR

SEQ ID NO: 302 - protein, 65 aa, synthetic construct
  REGION 1..65: note = Synthetic
SAVEQAELFLRFMNTPVAREILKVLKELKERGVSPEEILRLLTEVAEKLGDPLLAENLRFLLEHD

SEQ ID NO: 303 - protein, 65 aa, synthetic construct
  REGION 1..65: note = Synthetic
DRTHHATFTARTTDEREQEELRQRALLWLDRRFFEAKRLGLRSRFRLSLTWDGDDWRVEAHHEVR

SEQ ID NO: 304 - protein, 61 aa, synthetic construct
  REGION 1..61: note = Synthetic
SKKEEAKDAIRALRRMAKRLGVDEKYIRTASEIFKKLVKNGVDLEEALNFASIWLLNVLNS

SEQ ID NO: 305 - protein, 62 aa, synthetic construct
  REGION 1..62: note = Synthetic
DEEVEKLLRRAEKLLKEAKKKNDKEKLQEAARLVLKAARLTTKREDLQRATHLAWRIAKLLN

SEQ ID NO: 306 - protein, 62 aa, synthetic construct
  REGION 1..62: note = Synthetic
SDNLWTDIFELVMRALDEGVISEEEAKRIMARLNRAWERGLTEEVKKIKKEVKKLIKKARKS

SEQ ID NO: 307 - protein, 55 aa, synthetic construct
  REGION 1..55: note = Synthetic
DVEEALRLAIREARKQGDEKAVKKLEKLLKALRKGLTSEETALRRASEIMFRLVN

SEQ ID NO: 308 - protein, 62 aa, synthetic construct
  REGION 1..62: note = Synthetic
DSLMIEALRNVIRKIAKEVQNPEVEKLAKKVDKLLKLVRKGELDEREANKRALHLFFLAVSS

SEQ ID NO: 309 - protein, 65 aa, synthetic construct
  REGION 1..65: note = Synthetic
GERYSLTIHVDQRDERLWREAQRLALLWAFRFIYEARRRGLEVHHSNREDTRGNRATNHVELQID

SEQ ID NO: 310 - protein, 62 aa, synthetic construct
  REGION 1..62: note = Synthetic
TEIRKELEKIRKEVEKLQKKGRIDERLVEMIKRMIKQAKKTGDPFALMFARSLLEELKKLSG

SEQ ID NO: 311 - protein, 65 aa, synthetic construct
  REGION 1..65: note = Synthetic
TTRYSSFYTSVAASPKEQKEIEKKAEKLAQKFRKEAEKNGLKVTVRVRTHRRNGVVIVVVEVTVQ

SEQ ID NO: 312 - protein, 65 aa, synthetic construct
  REGION 1..65: note = Synthetic
SLEEIVKFVVKQVATFAGAEDVKVRISNGKVTVTFNGTDESARLASRVIKNMLWLAGVDVKVKLK

SEQ ID NO: 313 - protein, 65 aa, synthetic construct
  REGION 1..65: note = Synthetic
DVEELLEELKKLLSPELRNLLKVLLSQVKRIPDPEKREKLLRLIKEAVERNDEQLLQRLMFLAVR

SEQ ID NO: 314 - protein, 65 aa, synthetic construct
  REGION 1..65: note = Synthetic
DYEIIFKLTKLLHEDPRKFEELVERLLRELGVSPEEIEKILRKVREIIKRDPNKAVSFVFQLIQR

SEQ ID NO: 315 - protein, 64 aa, synthetic construct
  REGION 1..64: note = Synthetic
DEKVARTVLEVASELAIRTGDQRAMEAARFAAHVIERARRGELSEKDRKKLEKTLRKIEKKLRS

SEQ ID NO: 316 - protein, 60 aa, synthetic construct
  REGION 1..60: note = Synthetic
DEKLRKIANWLMKEAAKAGVSRELIMEASLKLIDAYVKGKIDPKKLAKKLLKELRKEVKK

SEQ ID NO: 317 - protein, 63 aa, synthetic construct
  REGION 1..63: note = Synthetic
TEEIKEQVKRAVKAAVRFGVDPEAAVRAIRLLLRLLIEEGKISKEEAKEATKVAEKVAKKAKG

SEQ ID NO: 318 - protein, 62 aa, synthetic construct
  REGION 1..62: note = Synthetic
SETDKVKKVVDTLLTKAKQQQDPNLARQAFSFAVKVSEKDPNDETVAKLVFKASIVWLQLHK

SEQ ID NO: 319 - protein, 65 aa, synthetic construct
  REGION 1..65: note = Synthetic
TRTFRWHWEFKGPDEETRKTIEQLERDAEKFAQEFAEKYNVRYNVVVFVVNTGDRIQVVILVIFI

SEQ ID NO: 320 - protein, 54 aa, synthetic construct
  REGION 1..54: note = Synthetic
GEHRAQRLLWLAVELGDQKVAVKILKVIQLWQEGKISDEDLERLAKEAEEELKK

SEQ ID NO: 321 - protein, 64 aa, synthetic construct
  REGION 1..64: note = Synthetic
DESVHKLAQKLLRKWAEAARKKDKKKLEEVEREAKEIADRIDNDEIKQQLMFFHFYAQKLKKDG

SEQ ID NO: 322 - protein, 64 aa, synthetic construct
  REGION 1..64: note = Synthetic
SDETKRLQKIAKKALKLLRQGKLDIEEAKRIVQKVVREATELGDEEAVRVAATIALALERIEEG

SEQ ID NO: 323 - protein, 65 aa, synthetic construct
  REGION 1..65: note = Synthetic
DSLEKKFRTIARRLLREAERRRDEELIQKILLLWLAFERALENNDEDALKDITKKLEETFRKLQK

SEQ ID NO: 324 - protein, 63 aa, synthetic construct
  REGION 1..63: note = Synthetic
SAKELAKRLVKLAKEVAKKLSDEEKSRKIKELAKKLEKAVKNNDERTVAQVQARLAILVLRAS

SEQ ID NO: 325 - protein, 63 aa, synthetic construct
  REGION 1..63: note = Synthetic
DEIARAAIEEILERAKKLARDPRIQKKIDKVLTKFKEAVKKNDEEKLAKVYHFASRLFAEAQS

SEQ ID NO: 326 - protein, 62 aa, synthetic construct
  REGION 1..62: note = Synthetic
SKEMQKVVTKVTSKAHKLGVSPEAIFEITLQIARLFDEGKLSPEQIEKWADKLAKKIAKKAS

SEQ ID NO: 327 - protein, 51 aa, synthetic construct
  REGION 1..51: note = Synthetic
SSEKAKKKIDKAIRNGDAQTAARALNEAYFRGLISPKEWYKLAERVVKARG

SEQ ID NO: 328 - protein, 65 aa, synthetic construct
  REGION 1..65: note = Synthetic
DEEEKVAKELRKVLKDAGATSFRVMILNGKIVVLFRGTSPEVKRASKVVTKYARSQGWKLQVNVL

SEQ ID NO: 329 - protein, 65 aa, synthetic construct
  REGION 1..65: note = Synthetic
SEEEQSRYLEMFLSHMFGVESVRVSVHNGTIHITVKGQTDAARAAQQYAKSYARVLNTKVDVKVK

SEQ ID NO: 330 - protein, 63 aa, synthetic construct
  REGION 1..63: note = Synthetic
LVIIVFAHVDPRLVKKFAKLIGAERIRVYRFGDSVILFVKDASPELVKKAKKIVKPNRVQVVH

SEQ ID NO: 331 - protein, 65 aa, synthetic construct
  REGION 1..65: note = Synthetic
DEENLKILIDQSGNPEDAVHQLSLFAKFKGISPEEIEKILEKVLRELGKVSPEEIEELKRLLKEK

SEQ ID NO: 332 - protein, 65 aa, synthetic construct
  REGION 1..65: note = Synthetic
QKHITITINLRNPHKDEEKEARERLRKFAKKVVEEARKRGQKARIHETTVEFNGTRSVSVLVIIR

SEQ ID NO: 333 - protein, 64 aa, synthetic construct
  REGION 1..64: note = Synthetic
SMEQANVVLFVAAELLKKTGDDSARKAIRYALTVLHRAYEGKLSEKDRKKAEKTLRKLEKKLRS

SEQ ID NO: 334 - protein, 64 aa, synthetic construct
  REGION 1..64: note = Synthetic
DREELLRELNRLAFLVVRVIKDPKYVKTAARLFVKAYELANKGDEESAKKVQKSIETIITRYKS

SEQ ID NO: 335 - protein, 61 aa, synthetic construct
  REGION 1..61: note = Synthetic
SEEEKRKRAKKKVRKIARSLGLSEEIARTLEFIFDSLVFLGVSIEMALKVIERFAKKLAKG

SEQ ID NO: 336 - protein, 50 aa, synthetic construct
  REGION 1..50: note = Synthetic
SSKELKKRIKKALKTGDVEKVIELSHIALQRGDEEAARLASRALFDLVNR

SEQ ID NO: 337 - protein, 65 aa, synthetic construct
  REGION 1..65: note = Synthetic
TQQVQIYVSYDPNDEHDEERAKEILEDRVRKVVKKHQKQGLEVRVRRRTLNFNGNRVLAVRIEIR

SEQ ID NO: 338 - protein, 61 aa, synthetic construct
  REGION 1..61: note = Synthetic
TDEREEVQELQKRLMDAAQKKDQEKLKKVVKEAKDIAKKVGDPMVENLLRYAITVAQKAVS

SEQ ID NO: 339 - protein, 65 aa, synthetic construct
  REGION 1..65: note = Synthetic
DEARKALVFVSLALAEYGVPHVKVNIRNGKITIRIEGDSPEAQTASEIAKKLVKQLGLPVDVQVR

SEQ ID NO: 340 - protein, 63 aa, synthetic construct
  REGION 1..63: note = Synthetic
LVIIVFENVDPRLVKKFAKLIGAERITVYRFGQIVLLFVKDASPELVKKAKKIVKPNRVRVVH

SEQ ID NO: 341 - protein, 62 aa, synthetic construct
  REGION 1..62: note = Synthetic
SKELEKVIKKVNKKAKKLGVSPEQIKRIEKEIREAYKRGEHSPEEIERLAEFWAEFAARLAE

SEQ ID NO: 342 - protein, 63 aa, synthetic construct
  REGION 1..63: note = Synthetic
DERLEHLKRLSERLFREALERRDERAIRIASLTHLALAKARNADKEEREEALRLVEHLLRLAE

SEQ ID NO: 343 - protein, 64 aa, synthetic construct
  REGION 1..64: note = Synthetic
DDIQKEARKVNHQLMEIFFRYPDNEKIVKLVTHAASLALEAFDKNDEEILKKAKKLLEKVKKIC

SEQ ID NO: 344 - protein, 55 aa, synthetic construct
  REGION 1..55: note = Synthetic
DKLTKAAKELAKKVKSGKLSPEEAAMWLSMIATRLGIDREEIHKAIRKLLKLIKS

SEQ ID NO: 345 - protein, 62 aa, synthetic construct
  REGION 1..62: note = Synthetic
SEEVERRVKKLIEKAKEAVKKNDEKKVKDVLAILVSLMMEAQTEEERRIVITAWFIVMQLHH

SEQ ID NO: 346 - protein, 65 aa, synthetic construct
  REGION 1..65: note = Synthetic
EVIVLVTFTRNGKRTSVTFRVDDDPREVKKAEKLAKDLAKKLKDQGVPLVLRVRKGDQRKRIEFR

SEQ ID NO: 347 - protein, 64 aa, synthetic construct
  REGION 1..64: note = Synthetic
SDETKRLQKIAKKALKLLRQGKLDIEEAKRIVQKVVREAEELGDEEAVTVAASIYLALRKIEEG

SEQ ID NO: 348 - protein, 52 aa, synthetic construct
  REGION 1..52: note = Synthetic
DLKKIARKLLSIAFELGNHKIFTLVQRIFLAIKDGDEKTAKKLIKKAQSLAS

SEQ ID NO: 349 - protein, 61 aa, synthetic construct
  REGION 1..61: note = Synthetic
DEKEKVRRVQKYATKLARKAGVSEEAIKILRELVEALIRNGVDASQAKDIARRFIEMTRFL

SEQ ID NO: 350 - protein, 65 aa, synthetic construct
  REGION 1..65: note = Synthetic
SKELIEEALRLLEKGDPRVEKVIVKLFNEAVRKNDRDLNIEVIRVFMLLRNGNPEEARKLLRKLR

SEQ ID NO: 351 - protein, 65 aa, synthetic construct
  REGION 1..65: note = Synthetic
SLAEVVRKNVKRIAKMVGVPGVSVDVRNGTVTVTFDGNDEHARRASEQVKLFARFLGVTVKVTFR

SEQ ID NO: 352 - protein, 65 aa, synthetic construct
  REGION 1..65: note = Synthetic
SIEELVKHVVKFVARVAGVPSVSVKIKDGKVSVTFKGTDEAAKEASMLVKLTAHLMGLDVDVKFK

SEQ ID NO: 353 - protein, 61 aa, synthetic construct
  REGION 1..61: note = Synthetic
SEEEKRKRAKKKVRKIARSLGLSEELAETLEFTFESLVFLGVSIEMALKIIERFAKKLAKG

SEQ ID NO: 354 - protein, 65 aa, synthetic construct
  REGION 1..65: note = Synthetic
DKTELVKRIVKFVAEVAGVTDFQVTVSNGKYHVRINGNDESAQNVRSLIELSAFLAGIDVKVTVE

SEQ ID NO: 355 - protein, 65 aa, synthetic construct
  REGION 1..65: note = Synthetic
SEEERIEKSVKQAAKFAGVESVSVRVSNGTIEVHLQGDNDAARQVELFLRFVSHLSGIPVDVQIR

SEQ ID NO: 356 - protein, 65 aa, synthetic construct
  REGION 1..65: note = Synthetic
TEEEFLKTSIKELAKLVGVPSVRVRVSNGTVQVEVDGNDRAAKDFSQQLKLFARFAGIPLDVKIK

SEQ ID NO: 357 - protein, 61 aa, synthetic construct
  REGION 1..61: note = Synthetic
SEEVAKMIKKNVEKIAKMLGLSEKITRTAKKVVEKAYRKGVDPLEVTNLALQFLVKAAESK

SEQ ID NO: 358 - protein, 65 aa, synthetic construct
  REGION 1..65: note = Synthetic
SEEELIREAIELVAPDPNLKETLKLTLRFAKHLGASPERIIFTLEKFLEDQGNPELAELFRKIVK

SEQ ID NO: 359 - protein, 63 aa, synthetic construct
  REGION 1..63: note = Synthetic
DYRKAVQYLIRVLREALRKNNEELVQLVNRAMFILVEVSKSNDEEKLDKVASKLIKELQEASS

SEQ ID NO: 360 - protein, 65 aa, synthetic construct
  REGION 1..65: note = Synthetic
SSSTTWTYTHQPRDVQEAAEFLFKVLKEARERARRLRKQGIDVKLRVRREWRNGKVTIQVTVEEK

SEQ ID NO: 361 - protein, 62 aa, synthetic construct
  REGION 1..62: note = Synthetic
NLALIAVFSLAKELYEKIGDPEIDKIRKKVEKLIRKYREGKLDESEAFNRAAKLQEELMKFI

SEQ ID NO: 362 - protein, 61 aa, synthetic construct
  REGION 1..61: note = Synthetic
SEEETRKRAKKSVRHFARWFGLSEEIARKLEKLFEKLVKSGISAEEAMNFISVIAVQISEG

SEQ ID NO: 363 - protein, 65 aa, synthetic construct
  REGION 1..65: note = Synthetic
SLLELLLRLLREGDPRVERVITRLLSLAIQRNDPKLLQVVNLIYFAIKNNDPDMVERAIERAKEL

SEQ ID NO: 364 - protein, 65 aa, synthetic construct
  REGION 1..65: note = Synthetic
SVTELVEEIVEKFKDDPEEVERLLQELAEKLKDPRLQQAVFTFKFALKLGASPEIIKETLRQFLK

SEQ ID NO: 365 - protein, 54 aa, synthetic construct
  REGION 1..54: note = Synthetic
SWLRLAWEALEIAERLGDEKAHRAVARILHLLARGRISEEEAEKALKRLIKKLK

SEQ ID NO: 366 - protein, 50 aa, synthetic construct
  REGION 1..50: note = Synthetic
SEEAIVRLYFKAARRGNRKVLRVLIRAVLALWRGDEETARKLLKLARKLD

SEQ ID NO: 367 - protein, 56 aa, synthetic construct
  REGION 1..56: note = Synthetic
SEEEKKIRKLVEKLKRKGKLSDREIANYVVKYWLKQGKLSEEQLLRATLIVQEVVG

SEQ ID NO: 368 - protein, 62 aa, synthetic construct
  REGION 1..62: note = Synthetic
TEEERHVEAVEVAARAAIQANDKEAIKKILEAAETVAKRISNPDLSKKVQKLIKKLRKALKS

SEQ ID NO: 369 - protein, 56 aa, synthetic construct
  REGION 1..56: note = Synthetic
SEISEKLLKLLEKAYEKGDEKALQIVTKALMLLSKGEIDPDQARKLAEKAERILRS

SEQ ID NO: 370 - protein, 65 aa, synthetic construct
  REGION 1..65: note = Synthetic
DIHSEYHIKIDPTDEQEEKRARLRAEALAYLAREKAEERGLENHNHIEIREHNGTIHVEIRINVH

SEQ ID NO: 371 - protein, 61 aa, synthetic construct
  REGION 1..61: note = Synthetic
SQMEKARRAQKYAEKLARKAGVSDDQIEQLKQAARFLFAQGVDASQVKDILRKLIEKIKKS

SEQ ID NO: 372 - protein, 59 aa, synthetic construct
  REGION 1..59: note = Synthetic
SEETKRIKKWAKKLAKKAGLDEWAIKLAQELVERLARNGIDPEVIKRMIELTIRFMKKL

SEQ ID NO: 373 - protein, 59 aa, synthetic construct
  REGION 1..59: note = Synthetic
DEEEAKFAVAVVKQLAKELNDEETLKILEEAEREARERNDWRIVFKVAVKLYHLLSRLR

SEQ ID NO: 374 - protein, 56 aa, synthetic construct
  REGION 1..56: note = Synthetic
DEIVELLFKLQYLALQLGDEKALRLAAKALMLLASGNIDPSQAKKLAKKLEKLVRS

SEQ ID NO: 375 - protein, 61 aa, synthetic construct
  REGION 1..61: note = Synthetic
SVVVIVDDERLAKLVSKLVNVERFQISTHGNLVLLNLVGVDPELAKKAVKTANKDAVVRVH

SEQ ID NO: 376 - protein, 65 aa, synthetic construct
  REGION 1..65: note = Synthetic
DVIEEILRLLRELGRLSPSVERALEFLREMLKRGVDPKDVLNQLLLFARFIGDPDVEKLAEEFLK

SEQ ID NO: 377 - protein, 61 aa, synthetic construct
  REGION 1..61: note = Synthetic
DDRKKVEDTLRKKFKEAEKNNDEQALARVVWKALELAEKFDDPELEKVAAELFETLARIQK

SEQ ID NO: 378 - protein, 56 aa, synthetic construct
  REGION 1..56: note = Synthetic
SEIEKKLARLLVKAFEKGDRKANEIVIKALFAYFHGLVDPDQARKLAEKAERILRS

SEQ ID NO: 379 - protein, 65 aa, synthetic construct
  REGION 1..65: note = Synthetic
DRDELIEENLRFFSEAANVPDVKFSVKDGRVKVTFNGDDEAAREAARAIRIFAWFAGVDVKVTTR

SEQ ID NO: 380 - protein, 65 aa, synthetic construct
  REGION 1..65: note = Synthetic
SRDELLRRNVEKLARIAGIPSVSVTVENGTVKVKVKGNDERAQFFSNQVHLFARFSGIPVQVDLR

SEQ ID NO: 381 - protein, 65 aa, synthetic construct
  REGION 1..65: note = Synthetic
TEQEMASHTIKFAAFLAGVSDVKVDVRNGTLKVTVRGNNESAQVLKKNVERIAKHFGVRVEVQTR

SEQ ID NO: 382 - protein, 65 aa, synthetic construct
  REGION 1..65: note = Synthetic
DEEVKEILEELKKRGVDPEEVFKIAAKILEEKLNISPTEAIFIAQYVALELGDPELLTVAAKLIL

SEQ ID NO: 383 - protein, 52 aa, synthetic construct
  REGION 1..52: note = Synthetic
DLWRLINRAAFLAVELGDQKVQQLALKAARAAMKGDEKTVKKLIKKAESLLS

SEQ ID NO: 384 - protein, 61 aa, synthetic construct
  REGION 1..61: note = Synthetic
SEEDKIQTLIDEVRKAAKRLYPDDEEVKKIESNAQELVDQASDQEEAKLTLRFLKHLLDSE

SEQ ID NO: 385 - protein, 63 aa, synthetic construct
  REGION 1..63: note = Synthetic
IEEVKKLMLLVSFAALRLANGKLDERKWKKIVKEASKILKKLGISEEEIRDFQRIAKELKKQL

SEQ ID NO: 386 - protein, 64 aa, synthetic construct
  REGION 1..64: note = Synthetic
DHLDEILKRIFELERKAWEIGDEELLRRLRLEQLTLLLRLAAHLDKEEREKLIKKWARLFQRAK

SEQ ID NO: 387 - protein, 65 aa, synthetic construct
  REGION 1..65: note = Synthetic
TTVRVYNFEARTDDEELLRKARELAKKLLKESKEWAERKGGKVKNRISFDRRGDKIWIIAVSSVE

SEQ ID NO: 388 - protein, 65 aa, synthetic construct
  REGION 1..65: note = Synthetic
SLKELLQEARERGDEDLLKVLSLLLFLIKLANIPPEEALKALERQLREHGDPDLLELLKELKELP

SEQ ID NO: 389 - protein, 62 aa, synthetic construct
  REGION 1..62: note = Synthetic
EERVLSLLQAAIFVAAEKGDSHRAEQAMKLAILLFLAEHSGDEELVKKISTKAEKLAKKVLS

SEQ ID NO: 390 - protein, 61 aa, synthetic construct
  REGION 1..61: note = Synthetic
DPLIFELLIRVQELADKFGLSPDEIKRFLNIAARLIVKGVTPEEIERYIKEELEKFKRKQY

SEQ ID NO: 391 - protein, 65 aa, synthetic construct
  REGION 1..65: note = Synthetic
DEEKLERQARAALILAHQFDAEDEQARRFAKEAARKLFEAIERNNDELVEEIIREIERHLKESRG

SEQ ID NO: 392 - protein, 65 aa, synthetic construct
  REGION 1..65: note = Synthetic
SKKEILEKVLELLKKNPDEAAQLILFLAFETGDPKVRRIFSVIAELIQTGDPELRKEAEKLLKRT

SEQ ID NO: 393 - protein, 63 aa, synthetic construct
  REGION 1..63: note = Synthetic
SWEELYEKAKKLVEQAKKENDEDKLRKARRLANRAAFAAVELGDPTAQRSAFHLYEIVHSVAE

SEQ ID NO: 394 - protein, 63 aa, synthetic construct
  REGION 1..63: note = Synthetic
DEHKAMLKTLIEELLRFAIELVDNPEERKKVTTLAKKIKKLLEKDPDTARRLALKLFREALKK

SEQ ID NO: 395 - protein, 64 aa, synthetic construct
  REGION 1..64: note = Synthetic
DVEVLMRVVEVANELLQRTGDDSANKAASWANRIIFRAIRGELSEKDRKKAEKEARKIEKKLRS

SEQ ID NO: 396 - protein, 55 aa, synthetic construct
  REGION 1..55: note = Synthetic
DDILSEINRVVFEAHRRGDDEILRKASRVAMLLLSGKIDDKEAKKLAEKLKKLLS

SEQ ID NO: 397 - protein, 65 aa, synthetic construct
  REGION 1..65: note = Synthetic
DEHIRNTIDIHGTDKHARELVFRYIVESERKAREEAERRGLKVHSEWETRFRDGHVHVEHRVTLR

SEQ ID NO: 398 - protein, 65 aa, synthetic construct
  REGION 1..65: note = Synthetic
SEEEIRRVIELIKKKNEMLAISLAFLLELVKRGEFSPEEFLNSAKRLVRWYGDPDAEELLKELEK

SEQ ID NO: 399 - protein, 63 aa, synthetic construct
  REGION 1..63: note = Synthetic
DPTEWKRQVEMMAWLNAEFGVDPRQVVKMVKKLLSEAQERGVVSPDEAKEALKVAKKVAKRLS

SEQ ID NO: 400 - protein, 65 aa, synthetic construct
  REGION 1..65: note = Synthetic
SRDETVERNVKFLARSAGVPSVDVKVSNGTVKVTIKGNDERAKFLTDQVRLFAMFAGLPFDVQVR

SEQ ID NO: 401 - protein, 65 aa, synthetic construct
  REGION 1..65: note = Synthetic
LRSEVIKYTIKGDSEEARKHAEELIRRERHRARELAKRLHLRLRLFVKTTERGDTIHVDINILIR

SEQ ID NO: 402 - protein, 61 aa, synthetic construct
  REGION 1..61: note = Synthetic
DKEQEDKVKEVIKRAKELVKKNPEEALSLVFKLWKEARDKNDERLMRLANVAAFEVHRYIS

SEQ ID NO: 403 - protein, 63 aa, synthetic construct
  REGION 1..63: note = Synthetic
DIHKVTQLIFAIVEIAARKNDEELYKLAVKAYFEYFDARRKNDEKKSKEVTKKVEKLWKRAQS

SEQ ID NO: 404 - protein, 64 aa, synthetic construct
  REGION 1..64: note = Synthetic
SVREVLFELIKIVRELLERGVTPEKIKRIVEEILRRLLKKGKLTPQAVRFLRKSVERALEYLEG

SEQ ID NO: 405 - protein, 53 aa, synthetic construct
  REGION 1..53: note = Synthetic
SEMLATLVQNAAKKAGDKEATKIARKLVKLLREGKVSPSEVIEILFKLQIRLL

SEQ ID NO: 406 - protein, 65 aa, synthetic construct
  REGION 1..65: note = Synthetic
FELIVFQLDFHKDDSSARKKFKDTVKKLKKKLEDIARKRNTTFSVHTHERRNGDIVILLVNFVVR

SEQ ID NO: 407 - protein, 61 aa, synthetic construct
  REGION 1..61: note = Synthetic
SKEDKAIRALFRLSEIAMKLGVDMKYIRTASEIFVKLVKNGVDLDQARRIAEKWLKKVVKS

SEQ ID NO: 408 - protein, 62 aa, synthetic construct
  REGION 1..62: note = Synthetic
DPNEEWLHQQAEMVRELAENLRDPRQIQDLVTAAEKMANAAEDPRVSKEVKKKLEEIYKKAV

SEQ ID NO: 409 - protein, 54 aa, synthetic construct
  REGION 1..54: note = Synthetic
DMLEVLKAALLAYRLGLKEALREAQQAVFRLADGKASEEDADKELKKIRKKLNS

SEQ ID NO: 410 - protein, 64 aa, synthetic construct
  REGION 1..64: note = Synthetic
DELLKKVKKRLEKLEETAKRQNNPEALKVVQAVLRDVKEALKRNDRERVHILLLFAEHWFKRLS

SEQ ID NO: 411 - protein, 63 aa, synthetic construct
  REGION 1..63: note = Synthetic
LLIIWFENVDPRLVKKFAKLIGAERIRLYRFGNSVLLFVKDASPELVKKAKKIVKPNRVTVKK

SEQ ID NO: 412 - protein, 55 aa, synthetic construct
  REGION 1..55: note = Synthetic
SRAAAKVMKVAIKAFEAGDPKAVRLANRILFALYRGEIDESQAKKLADEILKKIG

SEQ ID NO: 413 - protein, 60 aa, synthetic construct
  REGION 1..60: note = Synthetic
SEELKKLEKRLEEILRRLGVSPEQIKLLRKNLRKSYKISDSSAAKVFVEFVRQLFEKQRS

SEQ ID NO: 414 - protein, 61 aa, synthetic construct
  REGION 1..61: note = Synthetic
PIKDEAKKIAKELITKAVKHQNPELAFEATLVLVRLAEQYGLSLEWVNEVLKELVDKAKKS

SEQ ID NO: 415 - protein, 63 aa, synthetic construct
  REGION 1..63: note = Synthetic
PKWAEVNHILIRAILRAFEVGDEEVMRKAARLLFLLFEISDKNDEESLDKVEEKARKLLKKAI

SEQ ID NO: 416 - protein, 64 aa, synthetic construct
  REGION 1..64: note = Synthetic
DETVSHLLLLLLEAAYLALERNDPEGASRAQRALFIAMHLAQDPDPKAQKKAQDIAKTVYSEVS

SEQ ID NO: 417 - protein, 63 aa, synthetic construct
  REGION 1..63: note = Synthetic
DESEYETATRLAESAVKKVQDPEAEHLLRSIKKQWKELKSKYDDDEAVKYYHLMAYFLIQRFG

SEQ ID NO: 418 - protein, 65 aa, synthetic construct
  REGION 1..65: note = Synthetic
DEYEMISNQLTLFARFLGVGSFKVSIDNGRIKVHVKGNDHAAEDITEAAKFFSKLFGIPIDVQTH

SEQ ID NO: 419 - protein, 62 aa, synthetic construct
  REGION 1..62: note = Synthetic
DEEEEKEKEVRKVFRTAIRIPDKEKAQRFVKKYIEEARRRNDPKLEHLLRYVLMVIKMFSDT

SEQ ID NO: 420 - protein, 65 aa, synthetic construct
  REGION 1..65: note = Synthetic
DIHHTVQIDSDKLGEEQKEQILRALRFTAWLALREFRERGIDVKVRITSETHGDRTHQRVHLRAT

SEQ ID NO: 421 - protein, 65 aa, synthetic construct
  REGION 1..65: note = Synthetic
SSTESAVRLIRETVKILNPPSVTVTSSNGRVHVKIDGDTRLARQLQFFALMNSFMVGVPLDVQVR

SEQ ID NO: 422 - protein, 65 aa, synthetic construct
  REGION 1..65: note = Synthetic
SVQDSVEFILRLLGVSPEIIERVVRRIEELLKEGDREEVIRLIKKIAEELGDPQLELFARFLKAL

SEQ ID NO: 423 - protein, 61 aa, synthetic construct
  REGION 1..61: note = Synthetic
SKKEKAKEAEKKLRKIAKKLGVDERMIREASRFFEINLMFGVDLDIARRMAEMYLKMMVKI

SEQ ID NO: 424 - protein, 56 aa, synthetic construct
  REGION 1..56: note = Synthetic
SEIVKLLVRLARLAVELGKEKALHIVARALYALAKGAIDPDQARKLAEKAERILRS

SEQ ID NO: 425 - protein, 55 aa, synthetic construct
  REGION 1..55: note = Synthetic
DLASEALRLAFEAFKRGDRKAMHLALKASILIFEGEISEKQAKKLIKRIKKLIKG

SEQ ID NO: 426 - protein, 65 aa, synthetic construct
  REGION 1..65: note = Synthetic
SSDESVTRAVKFLATMAGVKSVKIRKRNGRIEVTVHATTSAAEDVVNLIRLTAMRLNIELDVKIK

SEQ ID NO: 427 - protein, 64 aa, synthetic construct
  REGION 1..64: note = Synthetic
DETKKIQKEVKELADDARKSISDPRLRELVALARTLAQVAARDPRFKEMVKTLKRIIKELKKQG

SEQ ID NO: 428 - protein, 56 aa, synthetic construct
  REGION 1..56: note = Synthetic
DEIQSKLNRLAFLAFKLGDRKAQSLAIKASHLVMDGRIDPSQAKKLAKKLEKLVRS

SEQ ID NO: 429 - protein, 65 aa, synthetic construct
  REGION 1..65: note = Synthetic
SEEYEIRVTFDPNDREAEQEARLKVLFAVYRLLREAEERGTQPEAEIREREDQDSITITIKVKFR

SEQ ID NO: 430 - protein, 63 aa, synthetic construct
  REGION 1..63: note = Synthetic
DHLKELFEHLLRLAFEASKTASEEQRHLLLTLLFAIRRALENNDEERAEKLLRSLEESIKRIR

SEQ ID NO: 431 - protein, 61 aa, synthetic construct
  REGION 1..61: note = Synthetic
DIEEEIRSLAKKLLEIIRKDPRHKEEAEKTLVRLLFEAMKKNDQKRAAAISMAFLFLHESQ

SEQ ID NO: 432 - protein, 64 aa, synthetic construct
  REGION 1..64: note = Synthetic
SEEEKKKLEKLFKKLIKILQNAPNPELRELARALERLFREAKKNNDAQALSNLVLRAKLVVEKG

SEQ ID NO: 433 - protein, 65 aa, synthetic construct
  REGION 1..65: note = Synthetic
DEEEEIRELIEKAVPDPELRRLLKEQLKRLEEEGVPPEEILFTLIFAALRYGDPEVARLLFELAQ

SEQ ID NO: 434 - protein, 55 aa, synthetic construct
  REGION 1..55: note = Synthetic
DVEKQAKKAIKLARKKGDEKAVRLLEKIAKLYRKGLIDEREARTLILTIALALLL

SEQ ID NO: 435 - protein, 64 aa, synthetic construct
  REGION 1..64: note = Synthetic
DEEVKKLLTEATKLSKEARSKASDEMNRYFLENTYRYLISQVKNASEDQKRELAKMAYEVLKAG

SEQ ID NO: 436 - protein, 63 aa, synthetic construct
  REGION 1..63: note = Synthetic
DRRRRFRIAAALLSAKLLARDPRIQKKIDKVLTKFEEAVKKNDEDKLKEVEEQARKLFKQARK

SEQ ID NO: 437 - protein, 60 aa, synthetic construct
  REGION 1..60: note = Synthetic
SEELKKLEKRLEEILRRIGVDPRAIKRLRKFLREVYKDTTSEQAKLFVRQVRHLAEVHRS

SEQ ID NO: 438 - protein, 54 aa, synthetic construct
  REGION 1..54: note = Synthetic
DLRQANRAAFEAYRQGNREAQRLAVQLTSGLQDGNTSEEEAKDALRKLKEALSS

SEQ ID NO: 439 - protein, 49 aa, synthetic construct
  REGION 1..49: note = Synthetic
SSEKLKRLAKEALKKGDEKLLSRLMSIAMELGDKEALREINRAYFEVHR

SEQ ID NO: 440 - protein, 60 aa, synthetic construct
  REGION 1..60: note = Synthetic
SDEKEKLKKWIDKLVKKFGLSPEQRRILELTLRFAWRLGASPDIIKEILRQAAEMMKKRG

SEQ ID NO: 441 - protein, 65 aa, synthetic construct
  REGION 1..65: note = Synthetic
DEELSEKIEEALKRGDERLVVQLVLRLATLAFEKGDEELARRLQVVLFLLSRDPEKAVRLVLRLV

SEQ ID NO: 442 - protein, 55 aa, synthetic construct
  REGION 1..55: note = Synthetic
DYERVISRALELAAEKGDHKALRELNEIFFRAHEGKLDPTKAERLARRIEKKLRS

SEQ ID NO: 443 - protein, 62 aa, synthetic construct
  REGION 1..62: note = Synthetic
DELEKLHTEAERIATKLERSPDPENKTIAEAIKAALRQALSDSDKESAKMVAYFAVNAARMV

SEQ ID NO: 444 - protein, 64 aa, synthetic construct
  REGION 1..64: note = Synthetic
DEREKERAEFIAAALSLLAASSDEREREEARRLAEAARRELSRKDSRLAEYFRHVFEESVRRLG

SEQ ID NO: 445 - protein, 65 aa, synthetic construct
  REGION 1..65: note = Synthetic
SREEVVRELLERFPDPREVLVLLYNILIRLGDPQLAALVAFLFHKLENGEIDPEEVRELVRRIVK

SEQ ID NO: 446 - protein, 65 aa, synthetic construct
  REGION 1..65: note = Synthetic
SREELLTRNVEFLAEQAGVPSFSVRVSNGKVKVTIEGTDEAAKFAVNQVLLFAMFMGVDVDIQVR

SEQ ID NO: 447 - protein, 62 aa, synthetic construct
  REGION 1..62: note = Synthetic
SDESKRHSFLTKLVALFMEARDPKFQHLLARAYDEFFRALDRNDKETLDKVIKKLDKIEKSY

SEQ ID NO: 448 - protein, 51 aa, synthetic construct
  REGION 1..51: note = Synthetic
NLEYDALRLIFLAFLKGDEKARTIARKLQAAIMKGDEDAIKKLATKLKRIL

SEQ ID NO: 449 - protein, 64 aa, synthetic construct
  REGION 1..64: note = Synthetic
SDETKRLQKIARKALKLLRQGKLDIEEALTIALRVVYIARELGASEAAEEAFRIQYALLEIEHG

SEQ ID NO: 450 - protein, 65 aa, synthetic construct
  REGION 1..65: note = Synthetic
PREEVLKILEELLKAPDPEKVIARLLLHASREGDEEKNRLVLAVIFLLREGVPPEEIREILRKLT

SEQ ID NO: 451 - protein, 65 aa, synthetic construct
  REGION 1..65: note = Synthetic
SEVARRLLELLKQGNEEEAQHLVVRALWEAAERGDSELALLLFRVQFLLMQGDPRVEEVLKRLEK

SEQ ID NO: 452 - protein, 65 aa, synthetic construct
  REGION 1..65: note = Synthetic
SSSQRYQINVDSSDPKDTEQAHRDAKTIAQRYAEELRRQGNPVNYEVNYSELNNLWVVFVTVHTK

SEQ ID NO: 453 - protein, 63 aa, synthetic construct
  REGION 1..63: note = Synthetic
SEDEKIKKHVKTRIKQILSKNSPEARKEAANYANRVVFHLYHVPDPHKQKLANEIFHYWSRLR

SEQ ID NO: 454 - protein, 61 aa, synthetic construct
  REGION 1..61: note = Synthetic
LEREHAIKRIVEHLVKHFGLSRDIEKTLKKVVEKLLKKGVDVFRITLIVSQLADEWARRLK

SEQ ID NO: 455 - protein, 61 aa, synthetic construct
  REGION 1..61: note = Synthetic
SDESRRELEERLEEAVRRGDEEKLRLLASTLAYAFLRAGKLSSREALKYVEELIKELKKRV

SEQ ID NO: 456 - protein, 65 aa, synthetic construct
  REGION 1..65: note = Synthetic
SKEEVLSRMARLTFRFAGATDVKVTIRNGKVTVEVRGDTPSVRAASRMVTWLAKRQGVDLKIRVK

SEQ ID NO: 457 - protein, 50 aa, synthetic construct
  REGION 1..50: note = Synthetic
SRETLKRRVKEAYKRGDAHELFKILFEAMERGDDEVIRFVLRVQFKLARR

SEQ ID NO: 458 - protein, 65 aa, synthetic construct
  REGION 1..65: note = Synthetic
DHRIRITFHFTGDDEKTKKEIQKEIERIRKELREEAKRKGKDIRIFVQRRRHGSTLVIYVVVRRK

SEQ ID NO: 459 - protein, 54 aa, synthetic construct
  REGION 1..54: note = Synthetic
SEIMARAVIKLARKKGDEKAVKIAEKILKAAERGLYTHEALHKLNHLIFYLMRK

SEQ ID NO: 460 - protein, 61 aa, synthetic construct
  REGION 1..61: note = Synthetic
SEEETIEEIEKLLERAVRELRVEELRRLVEELLKEARRINDLRFFEEAAQIALLAWLQDAL

SEQ ID NO: 461 - protein, 53 aa, synthetic construct
  REGION 1..53: note = Synthetic
SELREINRLMFLAVELGDPKLAQIALKAYRALRSGDEKTLKKLLKIAHKLVKS

SEQ ID NO: 462 - protein, 65 aa, synthetic construct
  REGION 1..65: note = Synthetic
NAERVVRLVKKLREELNVPPEEAIKILLEEALRRGDEELVFYLIFLLILVLGDPEKVREIFERLR

SEQ ID NO: 463 - protein, 64 aa, synthetic construct
  REGION 1..64: note = Synthetic
DLAREASHVLAQLAFSAEKTHNEELSRLQHRLAALLAEAIIRNDEELLKHLIRLARELLKRVHN

SEQ ID NO: 464 - protein, 62 aa, synthetic construct
  REGION 1..62: note = Synthetic
PEDDEVQRTLQSVLFKATKDGNEEVIRKALKLNFLFFLAKRNNDEETLKKVITKAKKVIKKQ

SEQ ID NO: 465 - protein, 58 aa, synthetic construct
  REGION 1..58: note = Synthetic
SEDDKAHKVLQTVLELLSKDPKKAQDFVKTFLKKAQKNNNERLVHLARYILMQAQMFR

SEQ ID NO: 466 - protein, 65 aa, synthetic construct
  REGION 1..65: note = Synthetic
TELVELAIELAKRLGDEMLVVSLMFILELVRRGEYSPEEAEHAVVRLARQFGNPVVEIIERLLKK

SEQ ID NO: 467 - protein, 65 aa, synthetic construct
  REGION 1..65: note = Synthetic
TERELIEENVKFLAKLANLSDVKVSFSNGKVTVNINGTSEHADDLRRQLTLFARFANLRVDVQTK

SEQ ID NO: 468 - protein, 65 aa, synthetic construct
  REGION 1..65: note = Synthetic
SEEEIRELIEKLGDPRIAIFTLLYALERKGKVPPEELHEALRRLLKLLKEGNEEEVRRLLTELID

SEQ ID NO: 469 - protein, 65 aa, synthetic construct
  REGION 1..65: note = Synthetic
SEEELKRLVERVVEGDPDARRILVELYNELVKKGDPQKAIILAFILTLAEEGNPEDAKRLVELLR

SEQ ID NO: 470 - protein, 65 aa, synthetic construct
  REGION 1..65: note = Synthetic
TEERRWRWELRKPSRQEEDETRAEALRVAYKALREAQERGGDAHSRVRVKHDGDTVTVETRVEIR

SEQ ID NO: 471 - protein, 65 aa, synthetic construct
  REGION 1..65: note = Synthetic
DRTETARRSIDRAAKFLGVPSWSVDVRNGTLHVKIDGTDDAVRQLSLFALFIAHLVGLPLKVDVR

SEQ ID NO: 472 - protein, 63 aa, synthetic construct
  REGION 1..63: note = Synthetic
SDRAFRKAVHIVEAAARRLNLEWAEELAKHLLRLWEEALRRNDEEALKWLFEELSRVMYRLAQ

SEQ ID NO: 473 - protein, 63 aa, synthetic construct
  REGION 1..63: note = Synthetic
DWRIAHRLLREANRIAYELGNERLWQLVARNFLALAKAIKNNDEELLKRLIESSKRLLEEIKR

SEQ ID NO: 474 - protein, 65 aa, synthetic construct
  REGION 1..65: note = Synthetic
SSSTTWTYTHQPRDREEAFRFAAKVAKEARERARRLRKQGIDVKLRRRLEWHNGKLTIQVTVEEK

SEQ ID NO: 475 - protein, 65 aa, synthetic construct
  REGION 1..65: note = Synthetic
DLVRLAVTAFLLGDPEAASLINVLIFALVEGDPEKLREALKRAEEVAKRLNDPVLEKAVKIAKKA

SEQ ID NO: 476 - protein, 65 aa, synthetic construct
  REGION 1..65: note = Synthetic
PLEEELERLLKENPRAAVTTALFLAQERGDPDLFKELLELLRLLEEDPNDEEVIRRVEKILRELQ

SEQ ID NO: 477 - protein, 65 aa, synthetic construct
  REGION 1..65: note = Synthetic
SLEQAIEFLLKTQGDPAARIVLEFVRELRERGVSPEEVLRLVEELLKKLNTPAARQLLLFIMFLK

SEQ ID NO: 478 - protein, 55 aa, synthetic construct
  REGION 1..55: note = Synthetic
SSAHVIIEALKLARKKGDEKALRLLNRLAFRAVRGELDPTKAERLARRIEKKLRS

SEQ ID NO: 479 - protein, 65 aa, synthetic construct
  REGION 1..65: note = Synthetic
DVEELVEEVLRKNDPRVLEKVLRLLREREGDPIRAFYILIELIAKILKVPPHEAAEILHRLLRLL

SEQ ID NO: 480 - protein, 65 aa, synthetic construct
  REGION 1..65: note = Synthetic
SAEDDVTSLVRLSAWMAGVPHVEVSFKDGRVSVTLKGTSPSVRSAKRVIQRVAKMMGVRIEVKTR

SEQ ID NO: 481 - protein, 65 aa, synthetic construct
  REGION 1..65: note = Synthetic
SIEEDVKMIVKLSAFLAGAEDVKVRISNGKVTVTFNGTDDAARSASRMIKHVLTMLGVDVKVKLK

SEQ ID NO: 482 - protein, 65 aa, synthetic construct
  REGION 1..65: note = Synthetic
DLEEAVERVIKRFKDDPENVAILLAFLLLLALEKDPRLVEEALRLIEELLGDPELVKWLERAVKQ

SEQ ID NO: 483 - protein, 52 aa, synthetic construct
  REGION 1..52: note = Synthetic
SETEILRVLFIAHRKGNREVAELALRASVAAFLGDPKTAEKLLRKAKKLLKS

SEQ ID NO: 484 - protein, 60 aa, synthetic construct
  REGION 1..60: note = Synthetic
DEDKELEEIVKKLAEDPTVQEIILKVASNSPYLRRTIIKLFRFDPRQAHLFIRFLAHQLK

SEQ ID NO: 485 - protein, 65 aa, synthetic construct
  REGION 1..65: note = Synthetic
SIDELLEKNLRKIGDPNLLRLTAVFIVSEALNVDPEEARKLLEKLERELGDPEEALRLAVRLALK

SEQ ID NO: 486 - protein, 62 aa, synthetic construct
  REGION 1..62: note = Synthetic
NLIAEAVWKIARELYEKIGDPEIDKLRKYVEKLIRKYREGKLDEHELNERALRVLFKLYRFI

SEQ ID NO: 487 - protein, 64 aa, synthetic construct
  REGION 1..64: note = Synthetic
SYEEILVKAYFILAEQFFERPDDEHIRKALLYVLRLVMKAIKASDPKESHEIARQVEEFLKKVS

SEQ ID NO: 488 - protein, 55 aa, synthetic construct
  REGION 1..55: note = Synthetic
KDIEKEIVKVFHTAMERGDIELALKASLVFMALHRGEISDEQAKKLAEKLKKLLS

SEQ ID NO: 489 - protein, 65 aa, synthetic construct
  REGION 1..65: note = Synthetic
DELLTEIIHLAARDPEKAKELIKEIVKELRKKDPRLVKEFLSMLLITLRFLGDPELVKLVEKLLR

SEQ ID NO: 490 - protein, 65 aa, synthetic construct
  REGION 1..65: note = Synthetic
SRVEKILVRLIARTGDPKYTLIAFALILLRREGLPPEEILKIVEKIVREANDPDLLRILEEAIKR

SEQ ID NO: 491 - protein, 63 aa, synthetic construct
  REGION 1..63: note = Synthetic
DIVEKVRRLATVAIFVAHKQNNEEIAVTLMKLIHQAHEAKLNNDEETLDKIRKIVETLYKRVV

SEQ ID NO: 492 - protein, 64 aa, synthetic construct
  REGION 1..64: note = Synthetic
SDETKRLQKIAKKALKLLRQGKLDWSEAIRIVLKVAKIAWELGDQKALNVANSIAFILVKIHKG

SEQ ID NO: 493 - protein, 61 aa, synthetic construct
  REGION 1..61: note = Synthetic
PEESEKFKKTVETRVKRAVDNRDMDLVNRVVWEALEIARRLNDPELEKWAAKLWLKAVRNI

SEQ ID NO: 494 - protein, 64 aa, synthetic construct
  REGION 1..64: note = Synthetic
SEEFRRHIEFLNRLLHLAHHHRELAEEAIRLLREHAEHAKRLNNEVLAELSERLARQLEEAIRH

SEQ ID NO: 495 - protein, 63 aa, synthetic construct
  REGION 1..63: note = Synthetic
DESERVRLAFWAAAHAYKHAQSEEEKKLAEAALRSAVKFAETKSDPKMQKLAKKLKEKLKKIV

SEQ ID NO: 496 - protein, 53 aa, synthetic construct
  REGION 1..53: note = Synthetic
SEKEAKKLLKIARKIGDRRAAFIAAAVLASLRRGQLSEEAAKAALAVVKELLS

SEQ ID NO: 497 - protein, 65 aa, synthetic construct
  REGION 1..65: note = Synthetic
SKEELKREVAKLLGIPPEELEKLIELAERAAGGDPEIAELTLYLALARLGVPPEVIKRILELLKR

SEQ ID NO: 498 - protein, 53 aa, synthetic construct
  REGION 1..53: note = Synthetic
SEEAAHLVQVAAKRAGDKEATKIARKLVKLLREGKISPEEVMRILNRLMFRLV

SEQ ID NO: 499 - protein, 63 aa, synthetic construct
  REGION 1..63: note = Synthetic
DEDKKVSEKVKKLVRKAENANDPTQIFKLLRKALELVMQVSDPTIHKEVATEAQRALFIAARR

SEQ ID NO: 500 - protein, 65 aa, synthetic construct
  REGION 1..65: note = Synthetic
TVRWEITVSFDRHNEEEERKARELLRRLLKKVHEWSRKRGLRNLYWRFETTRGDRVTIQVTSLSL

SEQ ID NO: 501 - protein, 52 aa, synthetic construct
  REGION 1..52: note = Synthetic
SLEEIFKVSFIAWRKGDEEVLKLAVRAIFAWLNGDPKTAEKLLRKAKKLLKS

SEQ ID NO: 502 - protein, 61 aa, synthetic construct
  REGION 1..61: note = Synthetic
TEQEKFKTTVKRLVDQALKENDPRLAVRVIWEALEEAEKKNDEDLARFVARLFLKVSRWFA

SEQ ID NO: 503 - protein, 53 aa, synthetic construct
  REGION 1..53: note = Synthetic
PEEVAKMINKVAESQGDKKALKLARKILKLLREGKLSDEQAINELQRILFHLA

SEQ ID NO: 504 - protein, 51 aa, synthetic construct
  REGION 1..51: note = Synthetic
DASDIFRLLEIAMKLGDEKALRVLLRAQFALAKGDEELARKLVKKARKLLS

SEQ ID NO: 505 - protein, 62 aa, synthetic construct
  REGION 1..62: note = Synthetic
PEVEIALFFAESVLKQAKRDNDSRSVRVVISILKRVIKKAQTEELRKKAKKLSEIAKKVEKS

SEQ ID NO: 506 - protein, 64 aa, synthetic construct
  REGION 1..64: note = Synthetic
DIQVAFTVQEVALQLLDETGDDSARKALNYATEVLFRAVEGELSEKDRKKLEKTLRKIEKKLRS

SEQ ID NO: 507 - protein, 62 aa, synthetic construct
  REGION 1..62: note = Synthetic
DDWTDHVEKLFSKAMEAVKKNDEDTVKTIEKILKDLTKKAQDPKQRELAALAITLVQSLLKD

SEQ ID NO: 508 - protein, 65 aa, synthetic construct
  REGION 1..65: note = Synthetic
SLEEDLSRMARLTFRFAGATDVKVTIRNGKVTVEVRGDTPSVRAASRMVTHLAKHFGVDLKIRVK

SEQ ID NO: 509 - protein, 65 aa, synthetic construct
  REGION 1..65: note = Synthetic
TSRNRFTVEVNKKNEEERRLAEENLWILAAFARRRAREEGGRAKVRVEEHEDGDTTRFHNEVEVR

SEQ ID NO: 510 - protein, 55 aa, synthetic construct
  REGION 1..55: note = Synthetic
SEVEKILVRLFNIAMKKGNREANRVVNHAYFAYKRGDIDEKQIRKLLKKAKSLLS

SEQ ID NO: 511 - protein, 65 aa, synthetic construct
  REGION 1..65: note = Synthetic
TRVFTWRFQAKNVHEQEIREAREHLKKLADHWLERIKRRGLRARVRTSSFRRNNTHIIVVQLEVH

SEQ ID NO: 512 - protein, 61 aa, synthetic construct
  REGION 1..61: note = Synthetic
DEEHTKELFEEAKRIAEELNIEELKFFVAAALANQELARNIDDEEEARELTESAINILRLI

SEQ ID NO: 513 - protein, 61 aa, synthetic construct
  REGION 1..61: note = Synthetic
NSDELKKRLEKIYRLVEEGKLDPDKAEQIANEIWREARKVGDDSVRQEALRVALYLHQFKK

SEQ ID NO: 514 - protein, 65 aa, synthetic construct
  REGION 1..65: note = Synthetic
SKDELITRNITELAKMAGVPHVEVRVSNGRVHVKLKGDDRHAKMAKRLVELTARFAGVDVKVTIR

SEQ ID NO: 515 - protein, 65 aa, synthetic construct
  REGION 1..65: note = Synthetic
DETLEKSLRKMLRLDPNMFELTVMFVLKLRGVSPEEIEKILRKVREIIKRDPEKAVEFVLRLIRK

SEQ ID NO: 516 - protein, 65 aa, synthetic construct
  REGION 1..65: note = Synthetic
TETHHFIWTIDGTNLRAAAKLTTLAAKEARREIKRAKRRGISVTVTITVRVNNGLAHVELILRLH

SEQ ID NO: 517 - protein, 65 aa, synthetic construct
  REGION 1..65: note = Synthetic
TEVEALSRIIEFVARVAGVPHVEVSWSNGKVTVTFKGTDHRVQEASRMALLTAMFLGVELKVQFR

SEQ ID NO: 518 - protein, 63 aa, synthetic construct
  REGION 1..63: note = Synthetic
PTEEIQHLLVRILKKAAEDGDRRLLHAANHLYFELEEAKKRNDEEKQKKILKRVRKLLKEAQR

SEQ ID NO: 519 - protein, 65 aa, synthetic construct
  REGION 1..65: note = Synthetic
SEIMELMTEAVDLGDPELLRLITLVAMAVAKGDPELLKRVEKEVRELSRKNPLVRRLLKIIEKLK

SEQ ID NO: 520 - protein, 51 aa, synthetic construct
  REGION 1..51: note = Synthetic
SIQEEILRLQFIAFEQGDHKIARLALRAAEALLNGDEETARKLVKKAKKLV

SEQ ID NO: 521 - protein, 61 aa, synthetic construct
  REGION 1..61: note = Synthetic
DEKKAAKFLKKHLTERARRAGVSPKAIKKIQTIFDRLIKSGVDLLEATLIALKLIDKWRRS

SEQ ID NO: 522 - protein, 63 aa, synthetic construct
  REGION 1..63: note = Synthetic
DERVVMNASLLILALLNRGVSEEQIKKFVKRLLEKLRKSGKISEEAAESVKRLAKRLIKIARG

SEQ ID NO: 523 - protein, 62 aa, synthetic construct
  REGION 1..62: note = Synthetic
DLEKEAQRVLYLLMHLAMQIQDPKQRHKAQRIIWRLLEAVKKKDEDKIKKLVDLAKKLIKLV

SEQ ID NO: 524 - protein, 56 aa, synthetic construct
  REGION 1..56: note = Synthetic
SEIVKKLLKLAEKAVRQGKRKALRIVSTALFQLVSGDIDPDQARKLAEKAERILRS

SEQ ID NO: 525 - protein, 65 aa, synthetic construct
  REGION 1..65: note = Synthetic
TIEFENTIVLNGNSERVQKWAEEWLEEWRRKLSELAKRLGLEIKHRIHRHRQGKFIVIHIHSRIK

SEQ ID NO: 526 - protein, 64 aa, synthetic construct
  REGION 1..64: note = Synthetic
PELDKIVHHALSLAAVIAFKATDPRIIRKAMKVSVLLMEAREEKDKDLVTKLLKKAQTLWKLVS

SEQ ID NO: 527 - protein, 55 aa, synthetic construct
  REGION 1..55: note = Synthetic
SVSILLLTAIFVAHEKGDEKALKKLQKLLRALQRGLTSEETAKRRAETILKRLRS

SEQ ID NO: 528 - protein, 65 aa, synthetic construct
  REGION 1..65: note = Synthetic
SLVEKIEKLLREGDPEEARQLALLLWLALHEKGDPRVELVRRLFRLLAKGDPEKAKKLAEELKRT

SEQ ID NO: 529 - protein, 53 aa, synthetic construct
  REGION 1..53: note = Synthetic
SIMEEIYKIQRLAEKLGDPKLEQIAMRAALAAASGDEKTLKKLRKIARKLIKS

SEQ ID NO: 530 - protein, 61 aa, synthetic construct
  REGION 1..61: note = Synthetic
SPQEAMELLFRAQYIARQKNDEELTHKLVRLLWLLVRAIKEGDKDTITKIERLAHEIYKKC

SEQ ID NO: 531 - protein, 65 aa, synthetic construct
  REGION 1..65: note = Synthetic
SLTETIQTSVTQAAKFAGVDKFSVTVHNGSVKVRVRGTDDASNQLILFVRFLAHRANLPVEVEQE

SEQ ID NO: 532 - protein, 63 aa, synthetic construct
  REGION 1..63: note = Synthetic
NELEKKAQRLAHLLAEIIKKVPDPTIQHQAATLFILLFRAIVKNDEEKLERLIKKAEKWIKSV

SEQ ID NO: 533 - protein, 65 aa, synthetic construct
  REGION 1..65: note = Synthetic
HRHYQFSVSVRGTDERAKKILKKFKEEVKKLTEKARRDYNTKVTFRIRSLRFGDVVLVFVDIRVE

SEQ ID NO: 534 - protein, 65 aa, synthetic construct
  REGION 1..65: note = Synthetic
TEQKSEEIETDGTDEEAEKRAREFWERIRKQARREARNRGRKVFVFIFREEHNGHIRHSVYVVFR

SEQ ID NO: 535 - protein, 64 aa, synthetic construct
  REGION 1..64: note = Synthetic
DLSKELEQRVRKLEKKWQEGKIDTQEALTEVLTLMFKAEETGKLDPKYLEWLLRVFEEWLRRVY

SEQ ID NO: 536 - protein, 55 aa, synthetic construct
  REGION 1..55: note = Synthetic
TFMDVINRAIFLAHKNGDDKALRILIRITHLAMQGKMSEEQAEKRARRIEKKLKS

SEQ ID NO: 537 - protein, 62 aa, synthetic construct
  REGION 1..62: note = Synthetic
DTKKKSKELLEILERLAKRHNLEELKRNIEALRLALRAAQQHNDEELIRKVDEIAEEAIRRG

SEQ ID NO: 538 - protein, 65 aa, synthetic construct
  REGION 1..65: note = Synthetic
SIRFKDYVQVSATDPHQVTRAKEIAKKFVKKVEKEARKRGLSVSYDVFVRRYGNRVFIVVVIEVE

SEQ ID NO: 539 - protein, 65 aa, synthetic construct
  REGION 1..65: note = Synthetic
PETVELSIRLKDTDEEAEKRVEKWLETIIKKLEEKAKKLGLRVKVRKFKLRRGSTLIIQVRIEIE

SEQ ID NO: 540 - protein, 60 aa, synthetic construct
  REGION 1..60: note = Synthetic
DRKEVQREVKERVDTALSNNDPRTAAQVVLDASRLAEELGDEELLRLVSQLMFKIAEFQG

SEQ ID NO: 541 - protein, 49 aa, synthetic construct
  REGION 1..49: note = Synthetic
SSEELKRLLDEARRRGDADLAAEVAWKAAEEGDREAIEAAFRLQYELLN

SEQ ID NO: 542 - protein, 62 aa, synthetic construct
  REGION 1..62: note = Synthetic
DDWTEHVKKLVKDAEEAVKKNDKHTVVRIWLILFRLFIKAQDPKQRKLATRALALVLHLYKS

SEQ ID NO: 543 - protein, 65 aa, synthetic construct
  REGION 1..65: note = Synthetic
GPEEAKEILKKINSPIAREVLRLLEEAERKNDPRLLEEAILVALTAAFAGIVSPEVFRLLVEFVE

SEQ ID NO: 544 - protein, 53 aa, synthetic construct
  REGION 1..53: note = Synthetic
NEQKMIETLIRSAIRDGNERQFRELVKVAKKHGLLSEDTLEQLKKEFKRFKKY

SEQ ID NO: 545 - protein, 65 aa, synthetic construct
  REGION 1..65: note = Synthetic
TETRKITITVPGNDEKAKKILKDIVTKIKKDAETHAKKRNLRVDIRYNTLEHNGKITVTIVVIFK

SEQ ID NO: 546 - protein, 65 aa, synthetic construct
  REGION 1..65: note = Synthetic
DREWHAHIDVKGTDRRAKEIAEHWALTWAFRILLRTRRQGLESHVSIKVRRDGDTVRARVTVRAH

SEQ ID NO: 547 - protein, 64 aa, synthetic construct
  REGION 1..64: note = Synthetic
DVRTLATRVKQRLTELYKLDTPEARKEVIKVWFKLMEIYSRITTEEEAKIILEAVLVAISVLLG

SEQ ID NO: 548 - protein, 54 aa, synthetic construct
  REGION 1..54: note = Synthetic
SDLARLMKLSQRAFEAGVPKAERIILRAMFALHEGKLDEKQLRKLQKLAEKLIS

SEQ ID NO: 549 - protein, 64 aa, synthetic construct
  REGION 1..64: note = Synthetic
SPDEIATLVRKNVEKLRRTFDNDWKRQAKLTVRFAILLAKKNNDERLVRLLKTILKQIEKLSQS

SEQ ID NO: 550 - protein, 65 aa, synthetic construct
  REGION 1..65: note = Synthetic
TELVEITLMFASRHNPLAKELLELLRELKEEGKFSEEELIKIIVKRAEELGNPLLARNLEHLFRV

SEQ ID NO: 551 - protein, 62 aa, synthetic construct
  REGION 1..62: note = Synthetic
SSEEIKHLIALVAFIFHKKGDRRAVEVWNRLFRLLELVRRGTLDPDEQKRLLKELKEEVKKL

SEQ ID NO: 552 - protein, 65 aa, synthetic construct
  REGION 1..65: note = Synthetic
SERYTFEVTFDKNDKEAEERARQKLLLFWARVAFRAERLNRSAEVRVRTSEHNGTIRIHVTIEIK

SEQ ID NO: 553 - protein, 65 aa, synthetic construct
  REGION 1..65: note = Synthetic
SEELLREVVERLGVPPEVLEVLTKQLRRLEEDGIPPEVILFTLALAAERLGDPELAELLAHLAAR

SEQ ID NO: 554 - protein, 65 aa, synthetic construct
  REGION 1..65: note = Synthetic
SEEIEELIRELFKKARNPEVKRVLALLYLALKKARSPEEREEIERLLRLIEEDPRLAREILKKLD

SEQ ID NO: 555 - protein, 50 aa, synthetic construct
  REGION 1..50: note = Synthetic
SWKDLLAEINSAFMKGDEKKVKKLKKIAEKRGDERAAHMAESALRQLQRR

SEQ ID NO: 556 - protein, 65 aa, synthetic construct
  REGION 1..65: note = Synthetic
DELINEIIQLAVKDPEKAKELIKEIVKELRKKDPRLVKLFLETLLLTLRFLGDPELVKLVEKLLR

SEQ ID NO: 557 - protein, 61 aa, synthetic construct
  REGION 1..61: note = Synthetic
LDEEKRIKTTVERLVKHFGLSRDIEKTLKKVVEKLLKKGVDSEEIALMVSMLAQRWAERLH

SEQ ID NO: 558 - protein, 56 aa, synthetic construct
  REGION 1..56: note = Synthetic
SEIEKKLRKLKKKARELGNKEAALAVQQAIQAYREGRISPEAAKRLAEQAERILRS

SEQ ID NO: 559 - protein, 62 aa, synthetic construct
  REGION 1..62: note = Synthetic
DEEVEKLLRRAEKLLKEAKKKNDKEKLREAAHLVLRAAALTQSDEDLKRAARLAMRIARLLN

SEQ ID NO: 560 - protein, 54 aa, synthetic construct
  REGION 1..54: note = Synthetic
DEHELQRLAWLALELGDEEIAREAFRVIMKVIEGKLSEKQAEKWAKKIRKKLSS

SEQ ID NO: 561 - protein, 65 aa, synthetic construct
  REGION 1..65: note = Synthetic
DSEHMVELTARFLAKRVGVPDVKIRKSNGRITVTVKGNDESAQIFSRVLKHMAKRLGVDVRVQTR

SEQ ID NO: 562 - protein, 56 aa, synthetic construct
  REGION 1..56: note = Synthetic
DKKYNELLRLLWKALELGDEKAARIAFRALVKLWEGKISDDDYKKVQKLITKALRE

SEQ ID NO: 563 - protein, 62 aa, synthetic construct
  REGION 1..62: note = Synthetic
DEEVEKLLRRAEKLLKEARKKNDKEKLKEAAKLVRKALRLTTSEEDRIRATRLWLRIAELLK

SEQ ID NO: 564 - protein, 64 aa, synthetic construct
  REGION 1..64: note = Synthetic
TLDDVMLRAVESQARKLIKKSRDPNAQSKLKKAIKIIQKASQVSDPNIKKSLVQKALTVVMDAA

SEQ ID NO: 565 - protein, 62 aa, synthetic construct
  REGION 1..62: note = Synthetic
SEEVKKILKRIVKLLAEQLGLDEKAQKIAKKVAEKLADKGVDPLEATLILVRVLDTILRRKK

SEQ ID NO: 566 - protein, 63 aa, synthetic construct
  REGION 1..63: note = Synthetic
DEELKTLMNIVNRLMFEAWRNNDEKSIRLAWTALQLLMRAHNADEEQQKKLKTLVKQLIKKIK

SEQ ID NO: 567 - protein, 65 aa, synthetic construct
  REGION 1..65: note = Synthetic
SEVQELVEEVLKRGNLEELIKEVLKLARELGDPYLEAAARDALELVKRDPERASFILVLVLEELK

SEQ ID NO: 568 - protein, 64 aa, synthetic construct
  REGION 1..64: note = Synthetic
DKEEIRQKIMNLAFAANLRVQDPRIKKTIHTVYRQAMEALDKDDEDTLRTLLKIVEKLLRDVHS

SEQ ID NO: 569 - protein, 65 aa, synthetic construct
  REGION 1..65: note = Synthetic
TEHYRWTVRVEGTDREAHQIIDEFIARILNEAFRIALKDTSHIRITVHTKVKDGEIRVEVRAERR

SEQ ID NO: 570 - protein, 57 aa, synthetic construct
  REGION 1..57: note = Synthetic
SINFDVQVRDENNHFSVLVQVEDPTEAEQQVLLFLMFLGVTATVRVDPDTGSVEVQQ

SEQ ID NO: 571 - protein, 65 aa, synthetic construct
  REGION 1..65: note = Synthetic
DDEELQRFIQRHVEETVGAPDVQVSVSNGTVKVTIDGNNDAAQAVRFTAELAKQKAGRNVDVTTR

SEQ ID NO: 572 - protein, 63 aa, synthetic construct
  REGION 1..63: note = Synthetic
HEEIANKLSKKVAEILDQQNASDEQKSKAHEILLEASLVLTNISDKDKAKSYADKVTKDISNM

SEQ ID NO: 573 - protein, 62 aa, synthetic construct
  REGION 1..62: note = Synthetic
DRLAYALTLSRSLLRDAKARNNEELIRLAEETSRLIEDARRRRDEELARRLVHKLLEAIRKA

SEQ ID NO: 574 - protein, 55 aa, synthetic construct
  REGION 1..55: note = Synthetic
TLREEAMKLAMEAMKRGDEKALRKAQRALFLMARGDISEKQAKKIIKEIKKLIKG

SEQ ID NO: 575 - protein, 65 aa, synthetic construct
  REGION 1..65: note = Synthetic
SETYKVTIDFDGKDEDTRERAELFARYFRLRAEEEARKRNVEVRIEIRFDTRNDKLKTDVRAEFR

SEQ ID NO: 576 - protein, 65 aa, synthetic construct
  REGION 1..65: note = Synthetic
DEEVLELVEELLKQGDEEEVEKLLAHVAARLKEKGDPEKAILVTNVWLRLKKNRERALEALKRVP

SEQ ID NO: 577 - protein, 64 aa, synthetic construct
  REGION 1..64: note = Synthetic
DRETEIFEFFAKTTIKRAVEENDEERLKELEHAIRRFYKEAKKRNDEDKLKVAKRLLEWFKKFV

SEQ ID NO: 578 - protein, 65 aa, synthetic construct
  REGION 1..65: note = Synthetic
DLEEELEEALKRGDPELLKRIVEKIIKKLGLPPNAEYSLKWWLEFLLRTKDPRAREAVESQVRHG

SEQ ID NO: 579 - protein, 62 aa, synthetic construct
  REGION 1..62: note = Synthetic
IDDVRWAASNARAYWARLGDDTFDKLRKKLEKVEKKVKEGKLDPEQARKFALEVFRRLVKLV

SEQ ID NO: 580 - protein, 62 aa, synthetic construct
  REGION 1..62: note = Synthetic
VVIIFVDNEELAKQVEEVARRLGVEVRVSKQGDLVVVTLQVRDPTLAKTAASVVPEARVHEF

SEQ ID NO: 581 - protein, 65 aa, synthetic construct
  REGION 1..65: note = Synthetic
DEEKKELHKEIERLLKELLRHAKSEVEHLAAASLLQLHRKAWENNDDELWEESKEKLEDARHALR

SEQ ID NO: 582 - protein, 61 aa, synthetic construct
  REGION 1..61: note = Synthetic
SVVVVVEDERLAKLVSKLVNVQRFSIFTFGNVVILNLQGVDPELAKKAVKTANKDASVLVF

SEQ ID NO: 583 - protein, 63 aa, synthetic construct
  REGION 1..63: note = Synthetic
QEEVHRTLLNLFLMLSHNARDPNLQEKAQRLARKALQAVDKNDDDTIKTLLKLLKRLVDEVRS

SEQ ID NO: 584 - protein, 63 aa, synthetic construct
  REGION 1..63: note = Synthetic
SEKDVKRFIKKLLDEARKKGLISEALKESLKRVAKELLKRGISTEEIKRILETTARFLAKENK

SEQ ID NO: 585 - protein, 55 aa, synthetic construct
  REGION 1..55: note = Synthetic
KDIEKEIKKVITTARRRGDELLVAQALAVAHLLREGLITDEEAKRLAEELKELLS

SEQ ID NO: 586 - protein, 63 aa, synthetic construct
  REGION 1..63: note = Synthetic
SEKDVKRFIKKLLDEARKKGLISESLKRQLKHLAEEALKRGADTSEIKKLLKIAAKVTAEFLK

SEQ ID NO: 587 - protein, 65 aa, synthetic construct
  REGION 1..65: note = Synthetic
SEEERKRLLEALERGEVSPYELALRLQRLAYENNDPELLNRATKVVMMLAHGDPRAEELLKELLK

SEQ ID NO: 588 - protein, 65 aa, synthetic construct
  REGION 1..65: note = Synthetic
SLEEVVEEAAELLNDPALRELVELLKEARENNDPELLTILVTNVWLRLHELGNPELARRVAKLRP

SEQ ID NO: 589 - protein, 65 aa, synthetic construct
  REGION 1..65: note = Synthetic
DEEESAQRLVKRTAEMAGVPRFDVKVSNNTLTLDVTGDDENVRDVTMNAHTTAHLVGLEFRVRTK

SEQ ID NO: 590 - protein, 65 aa, synthetic construct
  REGION 1..65: note = Synthetic
SIEEQARRVVEHVARRYNVKDFRVSVSNGKVSVTFKGDDEAAKRASRLVELTAHLAGIDLKVTVR

SEQ ID NO: 591 - protein, 64 aa, synthetic construct
  REGION 1..64: note = Synthetic
IELEEKVEHLASRAMSVAMENNNREELRRVNELYFKAEELSSSPDPKESKEALDRVRKELEKIV

SEQ ID NO: 592 - protein, 65 aa, synthetic construct
  REGION 1..65: note = Synthetic
SREEELLELVVRFKDDPKVILHLLEELLRLAQEKGDPDLEQLVAELFAILARDEERVVELAEKLR

SEQ ID NO: 593 - protein, 64 aa, synthetic construct
  REGION 1..64: note = Synthetic
DESLKKFKSDVEKKAREAKSNNDEKRLSEIVEEVLKFAQEAQNNNDQESASVAAVALFLVFKIQ

SEQ ID NO: 594 - protein, 64 aa, synthetic construct
  REGION 1..64: note = Synthetic
DEVLEASYLNKQLLELARRLNLEELVRLAEKSLRDLARAALNNASEEFKKTLVELSKELEELIK

SEQ ID NO: 595 - protein, 60 aa, synthetic construct
  REGION 1..60: note = Synthetic
DDEEAEEAKKLVDKVSKTNPRFREQAQLVKKNLTRAQRNKDKDDVEAAILLIISNYNVAS

SEQ ID NO: 596 - protein, 60 aa, synthetic construct
  REGION 1..60: note = Synthetic
DKREEVKTLYKILEEAAKKRDEETIDKVAARAYHLAVEIGDRELLLKIVSLWMHAQELLS

SEQ ID NO: 597 - protein, 64 aa, synthetic construct
  REGION 1..64: note = Synthetic
NEAQEKAAEIARTLAEKARRLGRPVDVSVRFKNQTLTVKVGPDPKEAEEAAIRIFAALFAKLEG

SEQ ID NO: 598 - protein, 65 aa, synthetic construct
  REGION 1..65: note = Synthetic
DLRFTFSVRDDSDDERSRRQSEDLAKAFVFTAALAAIELGLELRFEIRRLRDGHSNEVRVEVRIT

SEQ ID NO: 599 - protein, 65 aa, synthetic construct
  REGION 1..65: note = Synthetic
SFAEMVLEYLEKAGNPEAAKAVRVLLELLKRTGDPRIRNLINQIAWAVMEGDPRREELIRRVLEP

SEQ ID NO: 600 - protein, 65 aa, synthetic construct
  REGION 1..65: note = Synthetic
SEFVIITVELRNVSPEQSKKAEKKLKDIAKKLTKTAEKRNLEVRFRIKEQSHRGTKVLIFNLVVR

SEQ ID NO: 601 - protein, 65 aa, synthetic construct
  REGION 1..65: note = Synthetic
SEIEEVLELIRRYDPRVVEMLLVSLMFLKHMGASPEEILKYLLRLAKILGSPLATELLRRLLEKR

SEQ ID NO: 602 - protein, 63 aa, synthetic construct
  REGION 1..63: note = Synthetic
SEVRALTLALQVELLAKKVGDEEAKEAAKKAEELFRRLREGKLDASQVEKLLKRIIKKLRKLG

SEQ ID NO: 603 - protein, 65 aa, synthetic construct
  REGION 1..65: note = Synthetic
RRHWEYRIRVDARDERQRREAKALASIIATRLWLRSKEQGQENHFHIREERHGEDLTFHIRNETR

SEQ ID NO: 604 - protein, 65 aa, synthetic construct
  REGION 1..65: note = Synthetic
SKDELIRRNVEFLARVAGVESVSVDVRNGRVSVTLKGDNEAAKDVKNQLELFAMFANLDVKVNIR

SEQ ID NO: 605 - protein, 62 aa, synthetic construct
  REGION 1..62: note = Synthetic
SKELEKVIKKVNKKAKKLGVSPTAIKDIERFIREMYKSGLASPEEIEKEADRLAKLSAFLAR

SEQ ID NO: 606 - protein, 65 aa, synthetic construct
  REGION 1..65: note = Synthetic
DQLEEAIRRLLELVPDPRDVVNQIELFLRFMNSPEAREALRLLEELRERGVSPEEIVEIVLKIAR

SEQ ID NO: 607 - protein, 65 aa, synthetic construct
  REGION 1..65: note = Synthetic
HLHLRFSFHSEGDSERSERAAEQFAEAVRFTAALAARRRNLEVRVEIRIHIENGRTHVEIHVNIS

SEQ ID NO: 608 - protein, 65 aa, synthetic construct
  REGION 1..65: note = Synthetic
SETENVTFEIDGTDERAEEQIRRIVEKERRRAEKHAKKRNLRPHVHVLTIRINGKLLLIIVIVFR

SEQ ID NO: 609 - protein, 65 aa, synthetic construct
  REGION 1..65: note = Synthetic
SEEAKRELEEAKKRGNLERHLRSLLFALAAFLGDPEEATKRLEEIARSLNDPEAEKLVKKLSKET

SEQ ID NO: 610 - protein, 62 aa, synthetic construct
  REGION 1..62: note = Synthetic
TKEEKLKKAKKIVTTLAKLANVDPRQIKLLQSLVKMAWEKDDPFAKTMVEVIIRQLKHMVDE

SEQ ID NO: 611 - protein, 64 aa, synthetic construct
  REGION 1..64: note = Synthetic
DMRERSVEEMLRIIETVARRRDDPTAKTLVKRAKKILEEARRKNDPKLLRKALRLANRAYFSLK

SEQ ID NO: 612 - protein, 64 aa, synthetic construct
  REGION 1..64: note = Synthetic
VEELKKAQKKLDKAIKILRKKNDEMAVKLAEAVKRELKKASSDSDPRTIHRVIFVAVNAVRNAQ

SEQ ID NO: 613 - protein, 65 aa, synthetic construct
  REGION 1..65: note = Synthetic
TSQREDRNEFQPENEEAERLFKRAIRQAARAAVQRIRQQGIDVKVRFRTETHNGRVTLSVTFRHR

SEQ ID NO: 614 - protein, 65 aa, synthetic construct
  REGION 1..65: note = Synthetic
DEKDDFSRLVKLTLWLAGAKSVDVKVKDGTLDVKVEATDPSVEFASKTLTKWAKDQGLRVSIKID

SEQ ID NO: 615 - protein, 64 aa, synthetic construct
  REGION 1..64: note = Synthetic
VEELKKAMKTVQRAWTILMDKNDIEAALEAVSVFMMLAKASSDSDPRTIKTVIDLAKQVYKKAT

SEQ ID NO: 616 - protein, 65 aa, synthetic construct
  REGION 1..65: note = Synthetic
TNEEVVEHLARFNPRNLELTLRFMLELARREGNEDLVRVLEIVLRLLEEGVDPEEVVRVFKELLK

SEQ ID NO: 617 - protein, 64 aa, synthetic construct
  REGION 1..64: note = Synthetic
SDETKRLQKIAKKALKLLRQGKLDTHEALSIVMEVIRIALELGDRKAVQVANSIAFLLIKIEKG

SEQ ID NO: 618 - protein, 63 aa, synthetic construct
  REGION 1..63: note = Synthetic
DLRKVTRLIWAIAEIAKRKNDEELHKLAARAYAEYAKARRNNDEKKSKEVTKKVEKLWKRAQS

SEQ ID NO: 619 - protein, 62 aa, synthetic construct
  REGION 1..62: note = Synthetic
SKELEKVIKKVNKKAKKLGVSPESIKAIERNIRTLYKLGLLDPEEIEFFADMQAHMAAKRAS

SEQ ID NO: 620 - protein, 64 aa, synthetic construct
  REGION 1..64: note = Synthetic
DEEDKKFAEKVRRKALELIHKDTDEETRIHLTNLWLRAEAAQKTTDSEARRLFKELVEELERRL

SEQ ID NO: 621 - protein, 62 aa, synthetic construct
  REGION 1..62: note = Synthetic
PEVEELLVMAEIMLKQAKKKNNHMLVRSVLRILKEVIKKAQTEELRKKAKKLSEIAKKVEKS

SEQ ID NO: 622 - protein, 65 aa, synthetic construct
  REGION 1..65: note = Synthetic
RIEIEHSVLIRGDSEEAKKRAEEHQERFRKFAEDLARKLNRDVEITFFITELNGVIHSIATARIE

SEQ ID NO: 623 - protein, 62 aa, synthetic construct
  REGION 1..62: note = Synthetic
DETHKLYITVLSLARQAMSKNPEYHEEVARLYVKIFRLWFKGSPRVNEVLKKAEKILRSIIG

SEQ ID NO: 624 - protein, 62 aa, synthetic construct
  REGION 1..62: note = Synthetic
DSKTIAMLRVLIRIYAKRKQIPEIEKLAKKVDKLLKLVRKGLLDETEAEKRAARLWFLAVSY

SEQ ID NO: 625 - protein, 61 aa, synthetic construct
  REGION 1..61: note = Synthetic
HLAEMIKHLAKREITKAVQNNDEHKVELVVFFLKNAARSVDDPRLEEEIKRLVQTVLEQVL

SEQ ID NO: 626 - protein, 64 aa, synthetic construct
  REGION 1..64: note = Synthetic
DPDEILDKVANTLLTLAFQHPDDPELHKAFSMVAEISQKAKKLSDPTQKERLARLAQRILEEVS

SEQ ID NO: 627 - protein, 64 aa, synthetic construct
  REGION 1..64: note = Synthetic
DEEVAMTVSKVASMLFLQTGDESAVKAMHFALQVITRAEKGKLSEKDRKKLEKTLRKIEKKLRS

SEQ ID NO: 628 - protein, 65 aa, synthetic construct
  REGION 1..65: note = Synthetic
REQFFFFVRVNGNDPTQKKKAEDKAEKFRQKANTTAKRKGKKVRVTHSSSTQDGKYVVLVVIRVE

SEQ ID NO: 629 - protein, 65 aa, synthetic construct
  REGION 1..65: note = Synthetic
SEFIRELLRVAKELGDSVALMFLEQLLELLERGELSPEDVLRLVLLTLRFIGNEELVRLAEEVLK

SEQ ID NO: 630 - protein, 64 aa, synthetic construct
  REGION 1..64: note = Synthetic
DLDKRAKIVLSLARHLRKKVQDPHIRKLLEHLAKILEEAVKKKDEELIKKILVLVFRVIVEAQE

SEQ ID NO: 631 - protein, 65 aa, synthetic construct
  REGION 1..65: note = Synthetic
DEEEKFRKTIEKIAKKLGVEQVFVKVFQGQFVVFIVGDTESARKVQKLAKEVAKKLGVRVRVRIF

SEQ ID NO: 632 - protein, 62 aa, synthetic construct
  REGION 1..62: note = Synthetic
DKELKKVLNKVMKKASKLGVSPEAILHIAIQIQRLFREGKLSPEQIEKWADKLAKKIAKKAS

SEQ ID NO: 633 - protein, 63 aa, synthetic construct
  REGION 1..63: note = Synthetic
DMHEEAIKMLLRLLETARKEAPDPEKSKKIDKIIKKAKTWSSQVSLEESANYIFDLVVKVQRE

SEQ ID NO: 634 - protein, 65 aa, synthetic construct
  REGION 1..65: note = Synthetic
DEEERRKISERLKVDPKVAESLLRIKKWLERVLDPEFVRHSLLMFIFLLLKVDPREAERLLKLLE

SEQ ID NO: 635 - protein, 65 aa, synthetic construct
  REGION 1..65: note = Synthetic
SSTQRSEITVQARTEEEAEEAEEELRHSAEALAYLARRRGVDVKLEIRIERRGKRIRIRIRFELR

SEQ ID NO: 636 - protein, 49 aa, synthetic construct
  REGION 1..49: note = Synthetic
SSEELKKKIKKALKDGDRRAVTEIAMLAQELGDRELARIALEAAEKLAN

SEQ ID NO: 637 - protein, 64 aa, synthetic construct
  REGION 1..64: note = Synthetic
DPTSKKLKKEIKKVLKLFKKGKIDPVEAWNLLFRLIEKARRIGDEEAVQLAMHAIAIILHAMKS

SEQ ID NO: 638 - protein, 65 aa, synthetic construct
  REGION 1..65: note = Synthetic
DKDESFRRIVEWIARMLNVPDVKVSVNNGKFHVHLKGNDENAKDAERLVRLTALFMGVDVKIDLQ

SEQ ID NO: 639 - protein, 63 aa, synthetic construct
  REGION 1..63: note = Synthetic
PREEILHKINHLYFKAHEDGDKKVLKLLAKLLYKLMDAVRRNDEEKQKKIAKEVEKLEKIVQR

SEQ ID NO: 640 - protein, 65 aa, synthetic construct
  REGION 1..65: note = Synthetic
DERRTFTLEVKGTDEKAKEKLRRFALEVQFRVTTEARKNNRTVRVHVRVERRGDKIRVKIDVTIR

SEQ ID NO: 641 - protein, 62 aa, synthetic construct
  REGION 1..62: note = Synthetic
DPSEEVTKTVQSILTEALKNKDKELVHKAIRIALEAARKLNDPRIQEVITEAFTVALAVQLG

SEQ ID NO: 642 - protein, 65 aa, synthetic construct
  REGION 1..65: note = Synthetic
SEEELREALKELAERGDLHAAARVLNSLLFLLYEKNDPSMRKVAEVMIRANEDPRRLPELIKLVH

SEQ ID NO: 643 - protein, 60 aa, synthetic construct
  REGION 1..60: note = Synthetic
DEKLRKIMNWLMKEAAKAGVSRELIMRASMKLMMAYEKGKIDPKKLAKKLLKELRKEVKK

SEQ ID NO: 644 - protein, 57 aa, synthetic construct
  REGION 1..57: note = Synthetic
SEHEEFLEWLLRKIEEAIKRGNKISAEFLIGLAKQFLHVLNDDEIRRRLERLERLLH

SEQ ID NO: 645 - protein, 57 aa, synthetic construct
  REGION 1..57: note = Synthetic
SQHEKFLEWMLRKIEEAIKRGNKISAEFLINLAKNFIHVLGDDEIRRRLERLERQLH

SEQ ID NO: 646 - protein, 57 aa, synthetic construct
  REGION 1..57: note = Synthetic
TEEEIEEVEELLKKATDPKLRHMLEFLLRRLREALERNNLLSARFLLGLARQFYKSI

SEQ ID NO: 647 - protein, 54 aa, synthetic construct
  REGION 1..54: note = Synthetic
TRMRISVKFLLGLARQFTDPRIREWLLRRAERLAREGNDPELEELVRRVEEELK

SEQ ID NO: 648 - protein, 57 aa, synthetic construct
  REGION 1..57: note = Synthetic
SKVKLSVKFLLGLARQFYRAGNPEAAEYLIKRAKEIAEKNNNEELRKEIEELEREIR

SEQ ID NO: 649 - protein, 55 aa, synthetic construct
  REGION 1..55: note = Synthetic
SERNEHLLRWLLEKIRKSTNEISLRFLLGLLEQFARAAGTEEAREILREAEEIVK

SEQ ID NO: 650 - protein, 56 aa, synthetic construct
  REGION 1..56: note = Synthetic
DERSSAKISVEFLLGLAKQFTDPRIREWLLKRAKRLAEEVGDDELKRLIEKVEEEL

SEQ ID NO: 651 - protein, 55 aa, synthetic construct
  REGION 1..55: note = Synthetic
TKERVEHLVKWLLERAKRMPSPISRKFLLGLAEQFARAGNDPELERLVEKVKREL

SEQ ID NO: 652 - protein, 56 aa, synthetic construct
  REGION 1..56: note = Synthetic
DQAKRMVEWLLKKAREALKLGNEISVRFLLGLAKQFAHANNDEEAERLVREFEKEL

SEQ ID NO: 653 - protein, 60 aa, synthetic construct
  REGION 1..60: note = Synthetic
DLREKLKSMVKDLLRKAQESQDPYYAHQAEILIETIRKLAKDPDVQRLAQEALESLRKYL

SEQ ID NO: 654 - protein, 64 aa, synthetic construct
  REGION 1..64: note = Synthetic
DDIQKEAKKVIEQLQRIAKTFPDNMNVRYLVMLAERFAHAAQRMNDEEALKLAKRLLEKAKKAG

SEQ ID NO: 655 - protein, 62 aa, synthetic construct
  REGION 1..62: note = Synthetic
SLEMAVKWLLTVLKRLRDKAQDPTSRKLIEELYKKVEEAAKNKDPRAAHLAFYAVAQARMLV

SEQ ID NO: 656 - protein, 61 aa, synthetic construct
  REGION 1..61: note = Synthetic
DMITIAIKLATEVYRLLVEGNYDEASKLAKKAIEEADKKNDEDLKKFAERLLERIKKLKKS

SEQ ID NO: 657 - protein, 64 aa, synthetic construct
  REGION 1..64: note = Synthetic
PEEIYKRATKILTEAKKRAKDNPEIQRMIEMYQKMLEYAYKLNSEWALREIAHLVENAVRRLLS

SEQ ID NO: 658 - protein, 60 aa, synthetic construct
  REGION 1..60: note = Synthetic
DRMQVALKVATAVYKALAHNDPDKAKKIVDDAERLAKELGDEMLERLVKKLKKRVEDFKG

SEQ ID NO: 659 - protein, 62 aa, synthetic construct
  REGION 1..62: note = Synthetic
DETVIKAVMHAYRAWMQAARENDEDKAKKIIKSLKDLADKLNDPYAQRAVKNLEDTLKKLKG

SEQ ID NO: 660 - protein, 65 aa, synthetic construct
  REGION 1..65: note = Synthetic
DEEIEKVLEEVLGNPWDARVLAQLVRALQKLLNIDPEEAIKILIESLERMGNPEQAEALKEVLRH

SEQ ID NO: 661 - protein, 64 aa, synthetic construct
  REGION 1..64: note = Synthetic
PEDEWVKQVETILRKAKKVPDPTERKKLLIEAQVRARYAQQVATDPRVQKILEELIKIARKLYV

SEQ ID NO: 662 - protein, 62 aa, synthetic construct
  REGION 1..62: note = Synthetic
DFNQYQRAYDWAAEWIRRVLSASSEEESEKLIEKAKEEAKRRGDELALRLIERFQKLWRKNL

SEQ ID NO: 663 - protein, 61 aa, synthetic construct
  REGION 1..61: note = Synthetic
SQETVKDLVRKAKELADSLGDPISQEYVSTLEEAARRATKNNDEHKLRILRISLEYFLKQL

SEQ ID NO: 664 - protein, 62 aa, synthetic construct
  REGION 1..62: note = Synthetic
DLDERAKKLLKLLREVRKKAPDPDLRKKAEMASRMLEEALKKKDELYVQTLIRFAEVFVKLV

SEQ ID NO: 665 - protein, 64 aa, synthetic construct
  REGION 1..64: note = Synthetic
PEVKKKADHILKLLEEAMKKTKDPEVVQELMHLWFRLVWAAKEQNKEMLDRAAKHAKELIKKTS

SEQ ID NO: 666 - protein, 53 aa, synthetic construct
  REGION 1..53: note = Synthetic
PYQVTVHGRSETQTTTVSSYTEAWRWAYRAAKRLGLKITRVEFKDGTFHFHLE

SEQ ID NO: 667 - protein, 65 aa, synthetic construct
  REGION 1..65: note = Synthetic
SKELIYRFAIRYLLKEAGVPSFSVDVKNGTFTVTVQGTDKLADYARKMVKEFADKAGVKVEIRTK

SEQ ID NO: 668 - protein, 65 aa, synthetic construct
  REGION 1..65: note = Synthetic
SEEELIEKVERVLGDPRLRELLRRLVEDAKKMGIDPKMAVQVAARYIAQQEGNPEVEKVAKEVAK

SEQ ID NO: 669 - protein, 65 aa, synthetic construct
  REGION 1..65: note = Synthetic
SEDEKLEEKLKKIARIAGVPEFTISRSNGTLTVHFRGTDLAAQVLERYARQLAKSLGIPLRVEVR

SEQ ID NO: 670 - protein, 65 aa, synthetic construct
  REGION 1..65: note = Synthetic
SEELKKKLREALERGDRRAAAQLLYRIWAQARLRGNEEEARRHIRELLKEFGDPLLRYYLEYLEK

SEQ ID NO: 671 - protein, 64 aa, synthetic construct
  REGION 1..64: note = Synthetic
DESLKKWKSDVEKKAREAKSNNDMRALIRIATEVYRYYIHARQHNDEEAQKVAEEAYKLVRKII

SEQ ID NO: 672 - protein, 65 aa, synthetic construct
  REGION 1..65: note = Synthetic
TEEYDIQYRARAQARIAGVPSFSVRVSNGHLEVTLEGNDESVKTAKKAIERFARMRGIPVRVTTK

SEQ ID NO: 673 - protein, 65 aa, synthetic construct
  REGION 1..65: note = Synthetic
SEEEEKLIRIAAGGDPHAAFYILAQLRLLKKGDPSAKMLLERLKEELEKLGNPERAEALERLLRK

SEQ ID NO: 674 - protein, 62 aa, synthetic construct
  REGION 1..62: note = Synthetic
DLQKEIKTVIDLIKKIAKSKDNEMLKRAAKMLEEAWKKAAKLNSEYMLRQLLRMAEALLKRA

SEQ ID NO: 675 - protein, 58 aa, synthetic construct
  REGION 1..58: note = Synthetic
DETQKQALERYAEQVARYASRERASRALEMLIKILEKQNNEELVKVARKLLEWVRKYV

SEQ ID NO: 676 - protein, 60 aa, synthetic construct
  REGION 1..60: note = Synthetic
DKEEAKKIIEEATRRWRNARSHWEQEMILIHAALLLLEAASDAREAKHWMKLLETVLKND

SEQ ID NO: 677 - protein, 61 aa, synthetic construct
  REGION 1..61: note = Synthetic
SEDAKDKFREYAERAHELGVDRETIKYSLEAILRIMVKYGFLSPEEAEKVRRWLEEYLDKY

SEQ ID NO: 678 - protein, 51 aa, synthetic construct
  REGION 1..51: note = Synthetic
SAEEALDSAVKAAEKGDSEYIERLLKKAKSDNIIDEFHIHMIKLLLEEARR

SEQ ID NO: 679 - protein, 62 aa, synthetic construct
  REGION 1..62: note = Synthetic
DKYEKLLKILKKLAELALRNNNPEVARWVIHAVTVLYRAKVRDDPNLKEKAERLTRTAQKLV

SEQ ID NO: 680 - protein, 62 aa, synthetic construct
  REGION 1..62: note = Synthetic
TEKRKWIEKIRQLLHELMKLGLDPREILRVATHAYRLLIEGVSPSEVKKWVEKVVKEVKKRI

SEQ ID NO: 681 - protein, 64 aa, synthetic construct
  REGION 1..64: note = Synthetic
SEIKKKWEEVSKKVQKIAEQLSPTQRYLVELHARKARKLLENASSEEEKEKVLKLFELVARIVI

SEQ ID NO: 682 - protein, 64 aa, synthetic construct
  REGION 1..64: note = Synthetic
DYQKLEKRVKTLVTLIKQLKKDEWFEKAAERILRLAEEASKKKDEEKLQTLIRLAELIVRAAKR

SEQ ID NO: 683 - protein, 65 aa, synthetic construct
  REGION 1..65: note = Synthetic
DTSEKLTKAIEQYAREVGAPSVRVSVSNGKVTLTVRGDDERALKVASYAYFAASQAGIRLEIRIE

SEQ ID NO: 684 - protein, 61 aa, synthetic construct
  REGION 1..61: note = Synthetic
DETELARRLVKWLLSMVKNASNKMNAEYLLRQAERAARSVNDPTLQEQITRLKKWVEKHFR

SEQ ID NO: 685 - protein, 64 aa, synthetic construct
  REGION 1..64: note = Synthetic
DDDSHKKKLEDELESLIKKARDPEARKMVEWLAREAKKAADLGNKISAEFLLRLARQFAEASAR

SEQ ID NO: 686 - protein, 60 aa, synthetic construct
  REGION 1..60: note = Synthetic
DRKEQIKKFLKMVKERLDKATSREQIEIIVQSAKRYAEQANDPEAKKVVEKLEKDAKSKG

SEQ ID NO: 687 - protein, 61 aa, synthetic construct
  REGION 1..61: note = Synthetic
DDRKKVEDTLRKAYKEAEKHNDVHKLFRIVWLAKYLAEKFDDPELRKVAKQLHDTLRKWIK

SEQ ID NO: 688 - protein, 64 aa, synthetic construct
  REGION 1..64: note = Synthetic
DPRKEAKELVDRAKTLAKQVGDEHALKVIKKLEELLKKAIDNNDEKTWVYAWTVVRIIILVLEK

SEQ ID NO: 689 - protein, 65 aa, synthetic construct
  REGION 1..65: note = Synthetic
SYLELLVELVKRVDPELAEEVERLIRELKKQGISPMLILYKLLLIATFLGNEELIRIIRKVLHEL

SEQ ID NO: 690 - protein, 62 aa, synthetic construct
  REGION 1..62: note = Synthetic
DRATKMVRDISKKAETAARSGDRQRAQALVRLLEIFARAYPESPVSEEAKRVIEKVKKLIDS

SEQ ID NO: 691 - protein, 65 aa, synthetic construct
  REGION 1..65: note = Synthetic
DEDLKLANIAYYLASQAGADHFEVRVRNGRLTLTVKGDDEKAQKVRKHVQTHFDKLGVDVKVTYK

SEQ ID NO: 692 - protein, 64 aa, synthetic construct
  REGION 1..64: note = Synthetic
PLEELIKTLQRLARELARKVPDPKNRILLWKVMTLLYLAQIISDPNQSKTAVDRAKEILDRVRS

SEQ ID NO: 693 - protein, 64 aa, synthetic construct
  REGION 1..64: note = Synthetic
NEVQKRAKRALQLLAELLKKLNVDPKMVRQNLQRYAKTLQRYIQNPENRKFVQTVAEELAKRVM

SEQ ID NO: 694 - protein, 61 aa, synthetic construct
  REGION 1..61: note = Synthetic
SPDDVKKLARIVQKLAKEKRDMVAWYYAHQVYRLAEVAKRFNDKELADRLKEKLEKLVKKL

SEQ ID NO: 695 - protein, 65 aa, synthetic construct
  REGION 1..65: note = Synthetic
SELERLLELLKRVSPQLRLLVRMLEEALRRNDRMNARYAFKLVVRVLRALGDPLREEAERAARKV

SEQ ID NO: 696 - protein, 64 aa, synthetic construct
  REGION 1..64: note = Synthetic
PEEARKLIEKLKKLMKLAKEKNDPELVHIAIRLALLLWRAAQRNDEETLRKLEEIIKEVEKRLS

SEQ ID NO: 697 - protein, 60 aa, synthetic construct
  REGION 1..60: note = Synthetic
DEYVKKIIEYLKKELRKIGDSEAEERAERHLRELEKRGVDALKIADWAYYWLFNARVRKG

SEQ ID NO: 698 - protein, 63 aa, synthetic construct
  REGION 1..63: note = Synthetic
DPTEIKRRVEKLAKELYKRGISPVLAALIVYRHLTQLVREGKISPDEATEAQKVANKVAKRLL

SEQ ID NO: 699 - protein, 65 aa, synthetic construct
  REGION 1..65: note = Synthetic
SLEETVEELLKRLGVDPRLVYSVKAIIRIALRYGLSPEEILKLIIRYLRRAGDPEAAKLIEELLK

SEQ ID NO: 700 - protein, 64 aa, synthetic construct
  REGION 1..64: note = Synthetic
DLEEIARKAAKLAEEAYKKNDEYMRRLALMMLRSVIKYASRYDDPKYKEIRKLAETVYKKVKHG

SEQ ID NO: 701 - protein, 63 aa, synthetic construct
  REGION 1..63: note = Synthetic
DEVEKRIRSLLERIQKLLRHASPVARRYLLELARQILESLAHSPDDSVRKAAKEALERLRRFI

SEQ ID NO: 702 - protein, 64 aa, synthetic construct
  REGION 1..64: note = Synthetic
DPRKKLKELVDRARTLARQVGDLRAYRRVITLAYLAKMAIDNNDERKLKQAEEALKRIIKKLES

SEQ ID NO: 703 - protein, 65 aa, synthetic construct
  REGION 1..65: note = Synthetic
TEEIKYATKVYYAAVQAGVPHIEIRISNGTWKVTVEGDDESAQYVLKYAKTLADKLGVPINVRVR

SEQ ID NO: 704 - protein, 61 aa, synthetic construct
  REGION 1..61: note = Synthetic
SEEERKEKLRKVIERAARLVGISPEIIKRIQKEADKIFDKLSLLWAAHWVYRAIFEYKRQL

SEQ ID NO: 705 - protein, 60 aa, synthetic construct
  REGION 1..60: note = Synthetic
ERVKKMVDTLLKQAEEAVKRNNEYLLEQIKRLLESIEKLARDPNQKKLARDALETIRRLE

SEQ ID NO: 706 - protein, 65 aa, synthetic construct
  REGION 1..65: note = Synthetic
NEELNAKIIERVAEGDPDAHYRLRAQIRYARELGNEEVLKILEEALELWEEGDPDKVRELAERLK

SEQ ID NO: 707 - protein, 64 aa, synthetic construct
  REGION 1..64: note = Synthetic
PEHEKIVQHAMELAKKIFEKASNPEIRRKALHVALALWRALMRNDKDLATKLLKKAQTLWKLVS

SEQ ID NO: 708 - protein, 63 aa, synthetic construct
  REGION 1..63: note = Synthetic
DEQEEEDVRHLAELLYRLATQIPDETKAKKLLDNAYRILKEAQDPREAKKLLKELYEKAKKKA

SEQ ID NO: 709 - protein, 60 aa, synthetic construct
  REGION 1..60: note = Synthetic
DKKEELLKILKKALELLKRSGASEEQIRTYAEQWYRAVAQNDEDQLRRLEKIARTVEKRL

SEQ ID NO: 710 - protein, 64 aa, synthetic construct
  REGION 1..64: note = Synthetic
SREEELKAYNTAYYLAAQAAEDEDAERKARKILDKHLKDLKVPNAEEFKKLHDRMVKMIRSDQS

SEQ ID NO: 711 - protein, 62 aa, synthetic construct
  REGION 1..62: note = Synthetic
SLSEKLKTLLEQAERAANIPDEDKSRTILKKAEEKVRKLLRHPDPSVYQLAYKILLILTFLF

SEQ ID NO: 712 - protein, 65 aa, synthetic construct
  REGION 1..65: note = Synthetic
GSSTRNAEFIVLLAELCAKSQNDPSLQEYVKKVKKIVESLLSNGDEKSAEEVARKALEYCADGGS

SEQ ID NO: 713 - protein, 61 aa, synthetic construct
  REGION 1..61: note = Synthetic
STRNAEFIMLLLELCVKSKNDPQVQEYVKKVKKQVERLVGNGDEKKAEEVARKALEYCADG

SEQ ID NO: 714 - protein, 65 aa, synthetic construct
  REGION 1..65: note = Synthetic
DKELLERVVELLRQGNPEEARKLLRELLRELAELGDPLKRLVFQLLVLLAAGDPEWKEILKKLEK

SEQ ID NO: 715 - protein, 65 aa, synthetic construct
  REGION 1..65: note = Synthetic
TAEELLEIAVKDGNPELLRAMLRDIARASALAGNLEELEKVLERLLKEVGDPIFEEAIRLVKELH

SEQ ID NO: 716 - protein, 65 aa, synthetic construct
  REGION 1..65: note = Synthetic
GSDETCKEAERNIEFLALLAKLLDDPEHAERLLKQAEELAKKCNDPRLEKLVKKLSEEVRKYVGS

SEQ ID NO: 717 - protein, 65 aa, synthetic construct
  REGION 1..65: note = Synthetic
SEELEKKVKEAVEEGDPVIVFLLLAELLAETGDPEVEKLERLLQEALRRDDPDLAREVLELVKKT

SEQ ID NO: 718 - protein, 65 aa, synthetic construct
  REGION 1..65: note = Synthetic
GSDEKCKEAERNIEFLALLAKLLDDPEAAEELLKQAEELAKKCNDPRLEKLVKKLSEEVRKYVGS

SEQ ID NO: 719 - protein, 65 aa, synthetic construct
  REGION 1..65: note = Synthetic
DEEVRRLLKELLESGRFSCFAVVLLVSVDLIAKGIPPEEAAELVERAIKKLGDPCLEEALRELRT

SEQ ID NO: 720 - protein, 65 aa, synthetic construct
  REGION 1..65: note = Synthetic
SKIEKAIKLAKELGDPDAVRILELVKEFLEEGDPERAKALLRFLILILRQFGDPELVKIVEEVLP

SEQ ID NO: 721 - protein, 65 aa, synthetic construct
  REGION 1..65: note = Synthetic
DIVEEVIRKAEELGNPHVARLIEFLLALVKLAGLPPEELIKMLEHALEIEGDPIIRELIELLRKK

SEQ ID NO: 722 - protein, 65 aa, synthetic construct
  REGION 1..65: note = Synthetic
SEDDKKCKSVEDKARELIKKARDPLVQRALKAAIELIQKASQVSDPENKEFLCLLAKLLVESAIG

SEQ ID NO: 723 - protein, 65 aa, synthetic construct
  REGION 1..65: note = Synthetic
DEELEKAVELARRLGVDPEALKALLRAIKEALERGDKENLEFLLLLLELIVNDPEVRKLVRKVIK

SEQ ID NO: 724 - protein, 65 aa, synthetic construct
  REGION 1..65: note = Synthetic
DEEVRRLLKELLESGRFSPFAVVLLVSVDLIAKGIPPEEAAELVERAIKKLGDPDLEEALRELRT

SEQ ID NO: 725 - protein, 65 aa, synthetic construct
  REGION 1..65: note = Synthetic
SKVERLIELLKRLGDPNLRHLARALEEALRNNDEENLEFILLLIELVARALGDPEVLKLVREVLK

SEQ ID NO: 726 - protein, 65 aa, synthetic construct
  REGION 1..65: note = Synthetic
SEDDKKLKSVEDKARELIKKSRDPEAQRALKAAIELIQEASQVSDPENKEFLVLLAHLIVEAAAG

SEQ ID NO: 727 - protein, 65 aa, synthetic construct
  REGION 1..65: note = Synthetic
DDREFVAELILWLARFNPENAEHLCEAIVKILGLSPELEELCRRLVELVERGDKDKVEELLRRAK

SEQ ID NO: 728 - protein, 65 aa, synthetic construct
  REGION 1..65: note = Synthetic
PLAEESVEIAKREGNLEEAIEFLLLLARLLGNEEAVRLLEKAKELLKEGDPDKAEELVRRVLEII

SEQ ID NO: 729 - protein, 65 aa, synthetic construct
  REGION 1..65: note = Synthetic
SDETAHRIIRRVLEICDKRGDEDCSQKVLRLAILARSDAHHASSEEEASRIWQDAAKKVQKLESG

SEQ ID NO: 730 - protein, 65 aa, synthetic construct
  REGION 1..65: note = Synthetic
GSDLEDLKKEAKKLEKWVSNCRDPLLREAVSRLIEDVKKAADKGDKHNAEFAVLLAQLFVKSCGS

SEQ ID NO: 731 - protein, 65 aa, synthetic construct
  REGION 1..65: note = Synthetic
SDEQEEIRKKVQETLAELIKKCQKDPETAKKEVKKLRELAERLGDEELKRNVEFARLLCELLEGS

SEQ ID NO: 732 - protein, 65 aa, synthetic construct
  REGION 1..65: note = Synthetic
SREEEAVRESLREALEEGDPRTVSLALAICRIILGDPDLCREILREIAKELGNEEVVKEAEKLLP

SEQ ID NO: 733 - protein, 65 aa, synthetic construct
  REGION 1..65: note = Synthetic
GSDWRQAEHILRFIQHIARAANDEDALKRATTLLKQLQEATKKGDEDTVKRVIEEAEKLLRRAGS

SEQ ID NO: 734 - protein, 65 aa, synthetic construct
  REGION 1..65: note = Synthetic
SPLEEEVKKLVETAEKAAKDKNDPHAEEAVKSLDKLFKEAKKKNDEENLEFVSLLARLVLRAVIG

SEQ ID NO: 735 - protein, 65 aa, synthetic construct
  REGION 1..65: note = Synthetic
SEEAKKVLKFIKKAEKEARDANDPVAVELAHEALKLAEDAARRNDKEALRQAEFLAFLAAFIARS

SEQ ID NO: 736 - protein, 65 aa, synthetic construct
  REGION 1..65: note = Synthetic
SKVERLIELLKRLGDPNLRHLARALEEALRNNDEENLEFILLLIELVCRALGDPECLKLVREVLK

SEQ ID NO: 737 - protein, 65 aa, synthetic construct
  REGION 1..65: note = Synthetic
SEEDELRKLVEELEEKARKVIRTEEQREAVESLIDLAKKALKNGDKENVEFLALLVHLLIEAGGS

SEQ ID NO: 738 - protein, 65 aa, synthetic construct
  REGION 1..65: note = Synthetic
PEIEEKFEHIMRLLPPEDIQLLIFLLMVASEKGTEEEVIRYFVELVEKLGDPKEALKLLEEYVRR

SEQ ID NO: 739 - protein, 65 aa, synthetic construct
  REGION 1..65: note = Synthetic
PEIEEKFEHIMRLLPPEDIQLLIFLLMVASEKGTEEEVIRYFVECVEKLGDPKECLKLLEEYVRR

SEQ ID NO: 740 - protein, 65 aa, synthetic construct
  REGION 1..65: note = Synthetic
GSDWRQAEHILRFIQHIARAANDEDALKRATTLLKQLQECTKKGDEDCVKRVIEEAEKLLRRAGS

SEQ ID NO: 741 - protein, 65 aa, synthetic construct
  REGION 1..65: note = Synthetic
GSSTRNAEFIVLLAELLAKSQNDPSLQEYVKKCKKIVESLLSNGDEKSAEEVARKCLEYVADGGS

SEQ ID NO: 742 - protein, 65 aa, synthetic construct
  REGION 1..65: note = Synthetic
SDERERLREAVEELLRLAREENDAFIAALAVLLARSALEQDKDDELSRRLLELAEKVARELRSGS

SEQ ID NO: 743 - protein, 65 aa, synthetic construct
  REGION 1..65: note = Synthetic
SFALQILLRSARHHGDEEVVRVLERVIKLLEDGDPDSAEKLARELLEKTGDPIIRAALELLKRLK

SEQ ID NO: 744 - protein, 65 aa, synthetic construct
  REGION 1..65: note = Synthetic
SEELEKKVKEAVEEGDPVIVFLLLAELLAETGDPEVEKLERLLQECLRRDDPDLCREVLELVKKT

SEQ ID NO: 745 - protein, 65 aa, synthetic construct
  REGION 1..65: note = Synthetic
SDETAHRIIRRVLEIADKRGDEDLSQKVLRLAILARSDAHHASSEEEASRIWQDAAKKVQKLESG

SEQ ID NO: 746 - protein, 65 aa, synthetic construct
  REGION 1..65: note = Synthetic
SCIEKAIKLAKELGDPDAVRILELVKEFLEEGDPERAKALLRFLILILRQFGDPELVKIVEECLP

SEQ ID NO: 747 - protein, 65 aa, synthetic construct
  REGION 1..65: note = Synthetic
SPEDKEKARKILQSVLELVAHNQIDEKIASKLISEVKTLAKRVNDPQLLRNAEFVELLVRVLYRG

SEQ ID NO: 748 - protein, 65 aa, synthetic construct
  REGION 1..65: note = Synthetic
DEEVRRLLKELLESGRFSPFAVVLLVSVDCIAKGIPPEECAELVERAIKKLGDPDLEEALRELRT

SEQ ID NO: 749 - protein, 65 aa, synthetic construct
  REGION 1..65: note = Synthetic
GSSTRNAEFIVLLAELLAKSQNDPSLQEYVKKVKKIVESLLSNGDEKSAEEVARKALEYVADGGS

SEQ ID NO: 750 - protein, 65 aa, synthetic construct
  REGION 1..65: note = Synthetic
GSDLEDLKKEAKKLEKWVSNLRDPLLREAVSRLIEDVKKAADKGDKHNAEFAVLLAQLFVKSDGS

SEQ ID NO: 751 - protein, 65 aa, synthetic construct
  REGION 1..65: note = Synthetic
DEEVRRCLKELLESGRFSPFAVVLLCSVDLIAKGIPPEEAAELVERAIKKLGDPDLEEALRELRT

SEQ ID NO: 752 - protein, 65 aa, synthetic construct
  REGION 1..65: note = Synthetic
NFKEVIEELLRDGNCLIATALALTVLRELNTPEARELLKLLREALERRDPELLCRLLELVLELLK

SEQ ID NO: 753 - protein, 65 aa, synthetic construct
  REGION 1..65: note = Synthetic
SDERERLREAVEELLRLAREENDAFIAALAVLLARSCLEQDKDDELCRRLLELAEKVARELRSGS

SEQ ID NO: 754 - protein, 65 aa, synthetic construct
  REGION 1..65: note = Synthetic
GSDKELAKKAVKELLETALQQGDEENFEFAVLLAKLLARAVNDPDVERIIKELEKKFKDLKKSGS

SEQ ID NO: 755 - protein, 65 aa, synthetic construct
  REGION 1..65: note = Synthetic
DEEELKELAKRCGIPPEEVEKVLRKLEEHFGNPEAAKAMLFLALAACVYDPDSPTARVAREIIKK

SEQ ID NO: 756 - protein, 65 aa, synthetic construct
  REGION 1..65: note = Synthetic
SEEERILKLLEEAVRRGDPELLEELIRLLSELLGDPRNALFLAALYAIAAGNPEAEKIVEELRRR

SEQ ID NO: 757 - protein, 65 aa, synthetic construct
  REGION 1..65: note = Synthetic
SGSSKEDAEKLLEKLVEAARRNDDETVTKLQQLIDEICKKEQDDNVCFLALLAEVLLRSLKRGSG

SEQ ID NO: 758 - protein, 65 aa, synthetic construct
  REGION 1..65: note = Synthetic
DAERLIEIIREIHKKNPEAARLLFLILFLLLLLKDPELRKLYELVREAVEKGDPELVRRLEKLVH

SEQ ID NO: 759 - protein, 64 aa, synthetic construct
  REGION 1..64: note = Synthetic
HEVQELARKLWHATEKAEKRNDEKAVKLLEDASVLLVNAWLSNDEDLKKKANKYAKTVIKQAES

SEQ ID NO: 760 - protein, 55 aa, synthetic construct
  REGION 1..55: note = Synthetic
SVKKKVRKVEKKARKAGDELAVLLARRVLEALEKGLVSEEDADESADRIEEALKK

SEQ ID NO: 761 - protein, 55 aa, synthetic construct
  REGION 1..55: note = Synthetic
SVIEKLRKLEKQARKQGDEVLVMLARMVLEYLEKGWVSEEDADESADRIEEVLKK

SEQ ID NO: 762 - protein, 56 aa, synthetic construct
  REGION 1..56: note = Synthetic
DEVHKLAEKAARLALKKGDWDAHAKVVNVFLALKHGIISKEQAKKILKKIIEEILS

SEQ ID NO: 763 - protein, 61 aa, synthetic construct
  REGION 1..61: note = Synthetic
DDTKLARRKVKLALTIVKNASSKEEADRALHIAEIVADEVNEPTLQEQVTRTKKWVEKYFS

SEQ ID NO: 764 - protein, 55 aa, synthetic construct
  REGION 1..55: note = Synthetic
DYREVIKKAAHLAAKKGDEDAHAILVNIFLAADNGILDPTEAERLARRIEKKLRS

SEQ ID NO: 765 - protein, 55 aa, synthetic construct
  REGION 1..55: note = Synthetic
SFEEVIRRAIKLAEKKGDELAVYLLRYILKAVRKGLASEEEAEKAARRIEKVLKS

SEQ ID NO: 766 - protein, 62 aa, synthetic construct
  REGION 1..62: note = Synthetic
DKEEKVKKLKDRANEVASKAKTRLAMLLKILVEELEDALKKGDPDDYRLAYKKVEQAIKIIE

SEQ ID NO: 767 - protein, 64 aa, synthetic construct
  REGION 1..64: note = Synthetic
SEDSRLDQMKVKQAAKLAESGKVDPHAVKIIIKIILEAARERGDEDVIKVAERALEKVKKIESS

SEQ ID NO: 768 - protein, 53 aa, synthetic construct
  REGION 1..53: note = Synthetic
TIEEELKKLARKAWKKGDEDAHAVLVNAWRAYKLGDEKALKKLIKLAKELLDS

SEQ ID NO: 769 - protein, 54 aa, synthetic construct
  REGION 1..54: note = Synthetic
TKVQELIERLREHAERKGNAVAKVIADELEEALRRGDESDIRMNSRKAKQAIKA

SEQ ID NO: 770 - protein, 53 aa, synthetic construct
  REGION 1..53: note = Synthetic
DKRKKLEKIAERLAREGKLDEEEAEKLAREAWKAGDEELLAKIVNAWLHAKLS

SEQ ID NO: 771 - protein, 55 aa, synthetic construct
  REGION 1..55: note = Synthetic
SRVELLLEVLKRVAEIDGNEKALRVVKKAIEAYKKGLADEKQIEKLARKAQRLLI

SEQ ID NO: 772 - protein, 64 aa, synthetic construct
  REGION 1..64: note = Synthetic
DYQKLEKQVKTLVTLIKQLKKDEEFEELAQILLELAEIASKKKDEEELKLLVYALKWLVDEAKS

SEQ ID NO: 773 - protein, 61 aa, synthetic construct
  REGION 1..61: note = Synthetic
DDTRMARLKVTLALNIVKNASSKEEADSALHIAEIVAREVNEPTLQEKVTRTKKWVEKYFS

SEQ ID NO: 774 - protein, 64 aa, synthetic construct
  REGION 1..64: note = Synthetic
PEVKKEAKKAEELLTQARKLAEDPRIRYIIEVLIEELRKAVKNDNEEDLHIIIWRAKAIWKYVL

SEQ ID NO: 775 - protein, 62 aa, synthetic construct
  REGION 1..62: note = Synthetic
DKEEKVKKLKDRANEVASKAKTRAAIILKILVTELEEALKKGDPDDYELARRKVELALKHIE

SEQ ID NO: 776 - protein, 64 aa, synthetic construct
  REGION 1..64: note = Synthetic
DPRKKLKELVDRAKTLAKQVGDRMALLVVKALEMEAKEAIDNNDEEQLRMVEMKLRLAIKHLES

SEQ ID NO: 777 - protein, 64 aa, synthetic construct
  REGION 1..64: note = Synthetic
DPRKKLKELVDRAKTLAKQVGDRMALHVVKVLELEAKEAIDNNDEEELKLVERKLRLAIKILES

SEQ ID NO: 778 - protein, 59 aa, synthetic construct
  REGION 1..59: note = Synthetic
DQELAKIIATAVYEQAEKSGDPEDLRLAILKLEMAIKHVTDPNIRKYLKKLLENLKRLQ

SEQ ID NO: 779 - protein, 63 aa, synthetic construct
  REGION 1..63: note = Synthetic
DEDEKLIRRKIELALKILSKIPDPTAQKVVETAKKLYEEATKKNDKELLEDVAAYAVIQAIRI

SEQ ID NO: 780 - protein, 55 aa, synthetic construct
  REGION 1..55: note = Synthetic
DVEKLVKEVQKLAKKRGDEKAEEAAKIILHAYRAGVTSSKTASIALKILAKRLKG

SEQ ID NO: 781 - protein, 51 aa, synthetic construct
  REGION 1..51: note = Synthetic
EDREMLKRKVEIARRQGKLSDAILEALYAQARDLGDEEVRRLIETFRREKE

SEQ ID NO: 782 - protein, 64 aa, synthetic construct
  REGION 1..64: note = Synthetic
DETAELILKLASIALTVLAEVNDKVTVDITFNGYTVRVDLDRDPKKAQEAIRRALEYLEKANKK

SEQ ID NO: 783 - protein, 62 aa, synthetic construct
  REGION 1..62: note = Synthetic
PDEAVRLIADIVLEMLEEAQDPTDRTLLTKKVEQALKHAKSIPDPKAQKIVKDLKERLDKIG

SEQ ID NO: 784 - protein, 61 aa, synthetic construct
  REGION 1..61: note = Synthetic
LIREEVQRRLEEIKQKIKEGKLDPFEAMSLLAELYELVEKLGDPELRKELEKVMEIVMRLG

SEQ ID NO: 785 - protein, 65 aa, synthetic construct
  REGION 1..65: note = Synthetic
SKEELKERAIRLLKEGDPFEAAMLLMHLAFLTGDPRLEEVIRLLEEAFELGDPELLKEIIKLLEE

SEQ ID NO: 786 - protein, 64 aa, synthetic construct
  REGION 1..64: note = Synthetic
DVMEEAFTVWFQLENLAFRVDDPEQRKTVDTLSKLLQEAADRGDRELLKKVIKTARDVISKVNS

SEQ ID NO: 787 - protein, 65 aa, synthetic construct
  REGION 1..65: note = Synthetic
SELLERILRLLKEGNPEEAEEVARELLERTGDPRVEALVSLIEELLRTGDPFYELFVEMILRELR

SEQ ID NO: 788 - protein, 65 aa, synthetic construct
  REGION 1..65: note = Synthetic
DEELLELVYEAVEKNDPRLLFEAWMILASLLDKTGDPKIEELLRLLQLVDRGDPDARRRIKELFK

SEQ ID NO: 789 - protein, 65 aa, synthetic construct
  REGION 1..65: note = Synthetic
DEELMELVYEAVEKNDPELLFEAWMELASLLDETGDPKIEEALGLLQQVDGGNPDAGRRIKELFK

SEQ ID NO: 790 - protein, 61 aa, synthetic construct
  REGION 1..61: note = Synthetic
DPFTAMELVARVFELALEKNDEELQKEAETLMEIVIKAAQNNDEEKVKEVIKRAKELLSKS

SEQ ID NO: 791 - protein, 61 aa, synthetic construct
  REGION 1..61: note = Synthetic
DPFTAMELVARVFELALEKNDEELQKEAETLMEIVIKAAQNNDEEAVKEVIKRAKELLSKS

SEQ ID NO: 792 - protein, 61 aa, synthetic construct
  REGION 1..61: note = Synthetic
DPFTAMELVARVFELAVEKNDEELAKEAETLMEIVMKAAENNDEEAVKEVIKRAKELLSKS

SEQ ID NO: 793 - protein, 61 aa, synthetic construct
  REGION 1..61: note = Synthetic
DPFTAMELVARVFELAVEKNDEELAKEAETLMEIVTKAAQNNDEEAVKEVIKRAKELLSKS

SEQ ID NO: 794 - protein, 64 aa, synthetic construct
  REGION 1..64: note = Synthetic
DDHAQAQLVKKLLKLWQDQGDDFYALLAVEAAANERVKKYLKKYYPEVYTLLEQVKRTLEKKRS

SEQ ID NO: 795 - protein, 64 aa, synthetic construct
  REGION 1..64: note = Synthetic
PEVKKEAFKAFMLLMDALFLAEDPNIRKTIEELIERLEKADENDDEEKLKEIIKKAKTIWKQVL

SEQ ID NO: 796 - protein, 65 aa, synthetic construct
  REGION 1..65: note = Synthetic
SEEVEEAVELFKEDPKTALNLLFELFMRLVKEGDPEKAKLVQEVAELLMNGDPDKAREVARRVRK

SEQ ID NO: 797 - protein, 65 aa, synthetic construct
  REGION 1..65: note = Synthetic
DEEVDRAKELAEELGDPELAELIEELKELSKRGDPRAVEVVLRAMELANRLGDPEIQEVLIKLAE

SEQ ID NO: 798 - protein, 64 aa, synthetic construct
  REGION 1..64: note = Synthetic
DEESETIKKKLDDILRVVQSVNDPELESVVERAVKDAKKALDNGDKNTARFLLKMADLARQFAS

SEQ ID NO: 799 - protein, 61 aa, synthetic construct
  REGION 1..61: note = Synthetic
DKSERDIVEKIFKLVMEIMQYNPELAKKVHSIVEKAEHNQDPKLLKKALDVAEKALKTVSS

SEQ ID NO: 800 - protein, 56 aa, synthetic construct
  REGION 1..56: note = Synthetic
DEVFKAAMKVLHLAFKKGDEEAMKEVQKVSELLENGQASKEQAKKILESLARRLKS

SEQ ID NO: 801 - protein, 60 aa, synthetic construct
  REGION 1..60: note = Synthetic
DDSQVKDVESKAREHKKKHPQVSFLAFFVIEVARFAKEFNDPLALKVAEELLKEVEKRAK

SEQ ID NO: 802 - protein, 65 aa, synthetic construct
  REGION 1..65: note = Synthetic
TEEEFRVMMLLMTLSPELNELVEELSEAMDRNDPELEKRVLKRLLELARELGDEEVVRILEKLLK

SEQ ID NO: 803 - protein, 51 aa, synthetic construct
  REGION 1..51: note = Synthetic
SMEDTVREALKAAKKTGDEFYVSMAEMAAQLIGDEELKQRVKEAERYVREY

SEQ ID NO: 804 - protein, 60 aa, synthetic construct
  REGION 1..60: note = Synthetic
DESEEVKKMLEDLLQKVEKATDPTDRQFAIFMIELVLEAIPDPNQQKLAKTVLELARKLD

SEQ ID NO: 805 - protein, 65 aa, synthetic construct
  REGION 1..65: note = Synthetic
DLEEIVREYVERTKDPIAREALELLEEIKKEDPETAKVLAEAVVDAIERNDPESLKFVLLLIKIV

SEQ ID NO: 806 - protein, 65 aa, synthetic construct
  REGION 1..65: note = Synthetic
SELLEEALELVRRGDPRVFEVLFEIWMLAVQKGDPELEELIRKVDELLQEGNPEEASKLLEKLLK

SEQ ID NO: 807 - protein, 61 aa, synthetic construct
  REGION 1..61: note = Synthetic
DPFTAMELVARVFELAMEKNDEELQKEAETLMEIVLEAAKNNDEEKVKEVIKRAKELLSKS

SEQ ID NO: 808 - protein, 63 aa, synthetic construct
  REGION 1..63: note = Synthetic
DEDAKMSIKLVLEIARDLGDEDVYKKVKSLLETAEKQSRNASSEEEKSRIWQDAARKVMKLFF

SEQ ID NO: 809 - protein, 61 aa, synthetic construct
  REGION 1..61: note = Synthetic
DPFTAMELVARVFELALEKNDEELQKEAETLMEIVIKAAENNDEEAVKEVIKRAKELLSKS

SEQ ID NO: 810 - protein, 65 aa, synthetic construct
  REGION 1..65: note = Synthetic
SEVEELVELVVELIKKTDPELARDVKETLEELLKRDPKEVLLYLEFLAHFLGDPELLEKVRRLLK

SEQ ID NO: 811 - protein, 65 aa, synthetic construct
  REGION 1..65: note = Synthetic
DKEVLEEVLELVEEGNPFEAFFLLLELAFKLKDPEIDEVAQLIVEAFDHGDPDLIRELVRKLLEK

SEQ ID NO: 812 - protein, 64 aa, synthetic construct
  REGION 1..64: note = Synthetic
DDLDEIFTLSMLAMELAYKVGDPSLETEVQQVVDTASELVDKDPRFREEAKKILKKLVEKAKKT

SEQ ID NO: 813 - protein, 63 aa, synthetic construct
  REGION 1..63: note = Synthetic
NEEEKKKAQELVKQIEKILKQIDDPFYKEMVRMLLHIAKEMQDPEIIKEAYEAAKELLELAKS

SEQ ID NO: 814 - protein, 63 aa, synthetic construct
  REGION 1..63: note = Synthetic
DPESDAKRIATELATLYKKLDPEESRKVADTAFTIAMRLLSSPDPNDQKKAQIIAEVFDKLAT

SEQ ID NO: 815 - protein, 63 aa, synthetic construct
  REGION 1..63: note = Synthetic
DVKKLAKTVKEILKEAQKRHPTPEVKHEAEFISWFLDAATSVPDEKYATSILTELEKAARSLS

SEQ ID NO: 816 - protein, 65 aa, synthetic construct
  REGION 1..65: note = Synthetic
SELFELVMEAMEIANRLGDEDLMRLLVELVEKALESPEVRELLEKLARLIIEDPEKARELVKKLK

SEQ ID NO: 817 - protein, 65 aa, synthetic construct
  REGION 1..65: note = Synthetic
SFEELLRELVRRAGISPDDIDFVLWFVKVALENGNPEIAKELVEELLRKAGVPEEEIEKVKRLVE

SEQ ID NO: 818 - protein, 63 aa, synthetic construct
  REGION 1..63: note = Synthetic
DPSEEAQKLVDKVKEDVKKKNDEDAEEQVKVAEELLKEAKNAQDPRDREFLVLLIKLIVKNLS

SEQ ID NO: 819 - protein, 64 aa, synthetic construct
  REGION 1..64: note = Synthetic
HLEELNRHLLHLAFEAYFKIDDEHEAERFHKISEELQRLFENARSEEEKEKIVRLQEELIRRVI

SEQ ID NO: 820 - protein, 63 aa, synthetic construct
  REGION 1..63: note = Synthetic
DEFEKHMAQLAVEAIEEILKDIDDPHYKDLVRKLLETAKKEQDPTKISKALEKAIKLAEKAKS

SEQ ID NO: 821 - protein, 61 aa, synthetic construct
  REGION 1..61: note = Synthetic
RQEKLRRLLEKVRKLVEKGKLDPFQIMSLAAEVIQYAEKVGDETVRELAERLIEEVVKLAQ

SEQ ID NO: 822 - protein, 64 aa, synthetic construct
  REGION 1..64: note = Synthetic
DETKKVIDKLVSEAKKLADSIDDEFKRKLAQMAVESLEFEVNNAKNPEQVKKLWKEIHKIITDL

SEQ ID NO: 823 - protein, 65 aa, synthetic construct
  REGION 1..65: note = Synthetic
SEKEREVKELLEEISRRDPRISFYLFFVLIALEAGNPELAEELIEDLIRRFGDPLLRELLELIRK

SEQ ID NO: 824 - protein, 64 aa, synthetic construct
  REGION 1..64: note = Synthetic
DELEFLVWFAQVALEMVQEDPTNEEAKKVATDIVRDLDELEKKSRDPRAQELARRIKELYKKAC

SEQ ID NO: 825 - protein, 54 aa, synthetic construct
  REGION 1..54: note = Synthetic
SAFKLALKAMHIANELGDEKAMKTVQDIVRLFDEGRISEEEAEKALKRLIKKLK

SEQ ID NO: 826 - protein, 62 aa, synthetic construct
  REGION 1..62: note = Synthetic
SEESEKVKRWVETELTKANKQNDVFKAMSIVATALELAEELNDEELEKWVRSLAEEVFTKAV

SEQ ID NO: 827 - protein, 65 aa, synthetic construct
  REGION 1..65: note = Synthetic
SLLERIEEALRRNDPFLVAMLLMNLAFMTGDPRVDEVLRRFVKAFEEGDPEKAKELVKELLKRVK

SEQ ID NO: 828 - protein, 64 aa, synthetic construct
  REGION 1..64: note = Synthetic
MEASESAKELIKIVKSLYSNGDHNAKFYASMLKMLAEALELNAETEEIKKVVKEAKSVADSVLS

SEQ ID NO: 829 - protein, 61 aa, synthetic construct
  REGION 1..61: note = Synthetic
DEDKKTLDSLVSYVETVIQQANDPFLSFMLEVLLRFAQENNDPEAAKEAYKLAQDVKKNVD

SEQ ID NO: 830 - protein, 62 aa, synthetic construct
  REGION 1..62: note = Synthetic
DTEEIRNELFKIAMIALRVNNEELYEVAQKAAELLKEVSKDPRKREELKKLLKRARELSKRS

SEQ ID NO: 831 - protein, 61 aa, synthetic construct
  REGION 1..61: note = Synthetic
TELEFLEEMVRLVLENALENGLLSPDDVKKYEEKVKELRKRGDKDEVQKILEELLERLERW

SEQ ID NO: 832 - protein, 59 aa, synthetic construct
  REGION 1..59: note = Synthetic
GEFYIELVEMALDFVRMLSGDEEFIKRVRKRLKEVKERGDDSKLQEILEEVSEYIERVA

SEQ ID NO: 833 - protein, 61 aa, synthetic construct
  REGION 1..61: note = Synthetic
DPFTAMELVARVFELALKKNDEELQKEAETLMEIVMKAAQNNDEEKVKEVIKRAKELLSKS

SEQ ID NO: 834 - protein, 63 aa, synthetic construct
  REGION 1..63: note = Synthetic
SDDEFWRWMVKAAVDAAKELNPDPTVQTKADEILKKLEEALKKKDPTLVTRVLEEATRLAEEA

SEQ ID NO: 835 - protein, 64 aa, synthetic construct
  REGION 1..64: note = Synthetic
DEKEELEKRLREAEKLVRQIQNEFYKMLADMLTKTFKEALDNNDTDQLRMIVEVIEELARDALS

SEQ ID NO: 836 - protein, 61 aa, synthetic construct
  REGION 1..61: note = Synthetic
SDFLIHFAKEALEEARESGLLTPDEAEKWKKLLEEVRKRGDDNQIRKIYEEIIELVERLNG

SEQ ID NO: 837 - protein, 63 aa, synthetic construct
  REGION 1..63: note = Synthetic
DDEEVKTWEKLAKEAINRIPDKDVRTEVEKMVRDLIKAAHSPDPQEVRFALEMVRMIIETFRG

SEQ ID NO: 838 - protein, 61 aa, synthetic construct
  REGION 1..61: note = Synthetic
NEESEKLSRHLLELVERLVDDEDVVKTARELAREAIELSNSSDHRDRERAEFLNLLLKLLT

SEQ ID NO: 839 - protein, 64 aa, synthetic construct
  REGION 1..64: note = Synthetic
SEEDKIRKKVEEYVKKAIKRGINPSEVADWVAKYLTKAVREGKLSPEAARKIVNLAFELALKLI

SEQ ID NO: 840 - protein, 65 aa, synthetic construct
  REGION 1..65: note = Synthetic
SEVEEIIEELRRLGNPEVAEILELALRVAKELNDPQTEDSITELARLLKEGDPFAKHMLELIARD

SEQ ID NO: 841 - protein, 63 aa, synthetic construct
  REGION 1..63: note = Synthetic
DDSEEITKLLDDLVTKAKKKIKDPRDQKIAEDLAKEAKKLASSPDPFDKHMAKLLVEALQQFV

SEQ ID NO: 842 - protein, 63 aa, synthetic construct
  REGION 1..63: note = Synthetic
DPSEEAQKLVDKVKEDVKKKNDEDAEEVVKIAEELLKDAKNAQDPRNRSFLVLMIKMIVKNLS

SEQ ID NO: 843 - protein, 65 aa, synthetic construct
  REGION 1..65: note = Synthetic
PEEREKLEELIKKDPSEAVFLALSILARLFEETGDPRIEELFKLLFEALERGDKDLLERLLKRIG

SEQ ID NO: 844 - protein, 64 aa, synthetic construct
  REGION 1..64: note = Synthetic
KEEAKLNADFLVWMATVAARDSSPESRTIAKELIKEAKKLAKEANDPNVEKKVRSVEELIKKLG

SEQ ID NO: 845 - protein, 54 aa, synthetic construct
  REGION 1..54: note = Synthetic
SAFELALKAMEIANRLGDEKAEKTVKDIARLVSEGRISEEEAEKALKRLIKKLK

SEQ ID NO: 846 - protein, 63 aa, synthetic construct
  REGION 1..63: note = Synthetic
NEEEKHNAEFLLWFAKVMADYISDDDKRKKAQSLVEKARKLDIPEEAKKVYKIVSTILERDAK

SEQ ID NO: 847 - protein, 65 aa, synthetic construct
  REGION 1..65: note = Synthetic
DLIEKVLEALERGDPELLHRLLFELVMKLLSLGDPRLLELAQKLANAFDDNDEELLRKLLELLEP

SEQ ID NO: 848 - protein, 62 aa, synthetic construct
  REGION 1..62: note = Synthetic
SPKEELDKWSKIVKEIARKKNDEELYRIAERIYKDAKEALEKNDETDVKFLIEMLKMLSENG

SEQ ID NO: 849 - protein, 65 aa, synthetic construct
  REGION 1..65: note = Synthetic
PAAETLEEAVEEGNERHVEFYLFFVLQILEHDPDSPEAKELRRVLEELRRKDPRVEELLKEAKRR

SEQ ID NO: 850 - protein, 65 aa, synthetic construct
  REGION 1..65: note = Synthetic
DAEEILRELAKQVGVPPEEVEEALEILTRVLGDPKEAAFELLAILAEAAEKKDPRLFRELVERVR

SEQ ID NO: 851 - protein, 63 aa, synthetic construct
  REGION 1..63: note = Synthetic
DEEEVRRVLFYAWFYLVHLDTEEARKLAKTLDDLWKLAQSIPDPKQKKEVLDKLKEFAERVVS

SEQ ID NO: 852 - protein, 63 aa, synthetic construct
  REGION 1..63: note = Synthetic
DPSEEAQKLVDKVKEDVKKKNDEDAEEFVKVAEELLKQAKNAQDPHERRFLVEMIKMIVDNLS

SEQ ID NO: 853 - protein, 64 aa, synthetic construct
  REGION 1..64: note = Synthetic
DEEEIKRILEEEKRALEEAGLDEEAVRELLEESKREWDEVLRRNREEEWEKLKEVQRFRLAIIK

SEQ ID NO: 854 - protein, 64 aa, synthetic construct
  REGION 1..64: note = Synthetic
DPELEEAFKLTMLLMHLSMQVPDPEQQKTVETLAKLLTEAADKNDKDTLRKVKKKAKDVYSKLS

SEQ ID NO: 855 - protein, 62 aa, synthetic construct
  REGION 1..62: note = Synthetic
SEAEKVVKELLEDAKKLVENKQASPEDIEFIEFFVNIAAEANGDEELLKKVKKVIKELKDKS

SEQ ID NO: 856 - protein, 65 aa, synthetic construct
  REGION 1..65: note = Synthetic
SVEELIKELRELGDPELLRLAEEVLKLARKLNDPFLEKSIEELIRRAKKGDPFAKEMLEMLVHEG

SEQ ID NO: 857 - protein, 61 aa, synthetic construct
  REGION 1..61: note = Synthetic
DKEIEDKAKEVSKRAKELVKKDPFEAMSLVAKLFEEAFRKNDEELLRWAEKVWEEVRKYIE

SEQ ID NO: 858 - protein, 61 aa, synthetic construct
  REGION 1..61: note = Synthetic
DESLSKLVFTLLSLLAEAWKYDPDSAETAVELLIKAANNNDEEQLKKAVDYAKKVVDRATS

SEQ ID NO: 859 - protein, 52 aa, synthetic construct
  REGION 1..52: note = Synthetic
SLEEEARKLAEKLKRQGDEMAKELAKYLEDAVKNGDKNDVSFAIWMVRVFQE

SEQ ID NO: 860 - protein, 65 aa, synthetic construct
  REGION 1..65: note = Synthetic
SVREAVEIILKRVGVPPEFIRELKEELEEAEKEDPREAEELAEFIIAFALNVPPEEARRLLEELQ

SEQ ID NO: 861 - protein, 65 aa, synthetic construct
  REGION 1..65: note = Synthetic
DEEAVKELEKLAKELGDPELLEALKKLRERLEQGDPEANDLLFRLWFAVVNNDPDLVKELVKRVP

SEQ ID NO: 862 - protein, 65 aa, synthetic construct
  REGION 1..65: note = Synthetic
SVEELLELLERLLKETGDPDVSFILWFVRVALESGNPRIAIEIVLQAAEQLGDEELKKLAEELLR

SEQ ID NO: 863 - protein, 62 aa, synthetic construct
  REGION 1..62: note = Synthetic
DEHEKEFLKALAKMALDLLRNASDPNLAKELVSTVKDLADLVNDEDAKELKKQADEVSSKAS

SEQ ID NO: 864 - protein, 62 aa, synthetic construct
  REGION 1..62: note = Synthetic
TEKEKWKDKIFQLIMELLQLGLDPEEILKVAEKALELEKKGVSPSEIKKWVEKVVKEVKKRI

SEQ ID NO: 865 - protein, 64 aa, synthetic construct
  REGION 1..64: note = Synthetic
TDELKKEIEEVEKKVNTSLSKNPFLLWFARMAIEQAKEAVKKGDEEEAKSALTTVKELQKLVNS

SEQ ID NO: 866 - protein, 65 aa, synthetic construct
  REGION 1..65: note = Synthetic
SEEIERLVRRAAKGDEEAERLIEEIIEELKKRDEFRAAMVKMILEALKEVPDSEELLEDLTRMLE

SEQ ID NO: 867 - protein, 65 aa, synthetic construct
  REGION 1..65: note = Synthetic
DLEELLRRLREELGDPRDAIFVLLILLMEEGRLTPELLELADEADELIKRGDPRLEEVLKLLVKP

SEQ ID NO: 868 - protein, 62 aa, synthetic construct
  REGION 1..62: note = Synthetic
SEMKEVVRALVEEAEQRIREGKISPHEVRFYLEMARMAVEALGDPEAKKLVERLERLWRKIM

SEQ ID NO: 869 - protein, 65 aa, synthetic construct
  REGION 1..65: note = Synthetic
SEELREIVKRALEGDPEAEKLLEEILKELEERGDPRAFLLWFLIVAIRFGNPEVVEDVLEDLLKR

SEQ ID NO: 870 - protein, 64 aa, synthetic construct
  REGION 1..64: note = Synthetic
DPELEEAFKLTMLLMHLTMQVPDPEQQKTVETLARLLSEAADHNDKDTLRKVKKKAKDVYSKLS

SEQ ID NO: 871 - protein, 65 aa, synthetic construct
  REGION 1..65: note = Synthetic
PKEVAEVARLLVEDPNNKEALSLLMKLWFEAVERGDPELERLVRLVNELLQKDPREVRKLVERLR

SEQ ID NO: 872 - protein, 59 aa, synthetic construct
  REGION 1..59: note = Synthetic
GEFYIMLVEMALQAVRENSGDEEFIKRVRKRLKEVKERGDDSKLEEILREVTEYVQRVV

SEQ ID NO: 873 - protein, 65 aa, synthetic construct
  REGION 1..65: note = Synthetic
SEEEVEELLERLKKISPDVQFYLWFLEVALRSGNPEVAIEIAEDLLRLLGDPLVREIIKLLRKIR

SEQ ID NO: 874 - protein, 63 aa, synthetic construct
  REGION 1..63: note = Synthetic
DDEEVKTWEKLAKEAINRIPDKDVRTEVEKMVRTLIKAAHSPDPQEVEFALEMVRMIIETFRG

SEQ ID NO: 875 - protein, 65 aa, synthetic construct
  REGION 1..65: note = Synthetic
SEEEEIEELVRKDPIQAYFLLLELANKLGNEELVEEVAERVQELYENGNPEEATKLLVELLERLR

SEQ ID NO: 876 - protein, 63 aa, synthetic construct
  REGION 1..63: note = Synthetic
DPESDAKRIATELATLAKKLDPEESKKVFDTAFTIAMRLLRSEDPNDQKKAQIIVEVFDKLAI

SEQ ID NO: 877 - protein, 64 aa, synthetic construct
  REGION 1..64: note = Synthetic
DDIQKEAKKVIEQLQRIKKTYPDNEKILFLVELAIEAAQFAIKFNDEEALKVAKELLEAVKKIC

SEQ ID NO: 878 - protein, 61 aa, synthetic construct
  REGION 1..61: note = Synthetic
SKEEVFKLVFKVMEVAVRVGDPTAESIAKTLVEQANEAALNNDDEKLKKVSKRLKSFIKTF

SEQ ID NO: 879 - protein, 65 aa, synthetic construct
  REGION 1..65: note = Synthetic
PDELVEEVVKKFGISPFIRFFLRIVVEQLKRGEIDPEDAEKTLRDLLETVGISPEEIEEILRRLK

SEQ ID NO: 880 - protein, 61 aa, synthetic construct
  REGION 1..61: note = Synthetic
DESLAKLVFTLMSLLAEAWKYDPDSANTAFELLMKAAKNNDEEQLKKAVDYAKKVVDRVLS

SEQ ID NO: 881 - protein, 64 aa, synthetic construct
  REGION 1..64: note = Synthetic
TVMDEAFKVTFEVMELADKVPDEKVSRLLKTLAKLLTEAADRNDEELLRKLIKKVKEVRKQAKS

SEQ ID NO: 882 - protein, 62 aa, synthetic construct
  REGION 1..62: note = Synthetic
SEMKEVVRELVEDAEQRIREGKISPEEVEFLLLMARMVVEELGDPEAKKLVERLERLWRKIM

SEQ ID NO: 883 - protein, 63 aa, synthetic construct
  REGION 1..63: note = Synthetic
RKEEAEDTAFKLFMLWLTLTNPEERKKVEKQIETLVKKLSNAEDPQEQKVAKTVKETLDLLRS

SEQ ID NO: 884 - protein, 54 aa, synthetic construct
  REGION 1..54: note = Synthetic
SAFELALKAMEIANKKGDEKAEKTVQDIVRLVMEGKAPEEYAEKALKRLIKKLK

SEQ ID NO: 885 - protein, 65 aa, synthetic construct
  REGION 1..65: note = Synthetic
DELEAVREYAKFLAEIAGVPSVSVRVSNGRIQVTLKGTDEAARAVQKILTEAVKHWGVDVDVQVR

SEQ ID NO: 886 - protein, 61 aa, synthetic construct
  REGION 1..61: note = Synthetic
SDDDVKKLLDELEKLADQIPDEFVSLMVKMIVDAARKALKLGDTEEAKMIAKVAEELVSKG

SEQ ID NO: 887 - protein, 65 aa, synthetic construct
  REGION 1..65: note = Synthetic
SVEELLELLERLLKETGDPNVEFILWFVRVALENGNPRVAIEVVLEAAEQLGDEELKKLAEELLR

SEQ ID NO: 888 - protein, 64 aa, synthetic construct
  REGION 1..64: note = Synthetic
DVDEAVKAVEEAVRMVQKHPDDEALRWFARVVIEFVKELASSIEDEDQSKTAQKRATELERKLE

SEQ ID NO: 889 - protein, 65 aa, synthetic construct
  REGION 1..65: note = Synthetic
DTFTYLIKLLSKGDPFARHMLENLLEDAKLRGDEELYRLIKEAIELVEEGNPEEAEKLAKRVDEK

SEQ ID NO: 890 - protein, 62 aa, synthetic construct
  REGION 1..62: note = Synthetic
DAREIFRVLALAAETIEKASEEEVRRELEKLIEELFQAAHRNDEEALKKVLKRLKELIKEQK

SEQ ID NO: 891 - protein, 59 aa, synthetic construct
  REGION 1..59: note = Synthetic
DEFELAFTVMSLAFQADLAEDEKELRTLQSLIEEILRKAQSEFLRKLAEDLLKEVRNNS

SEQ ID NO: 892 - protein, 60 aa, synthetic construct
  REGION 1..60: note = Synthetic
DEEETIRSVLKELKDDASNASSDEDREFLIWMVNVFAETVPDPTARKIAKEINETLSKLS

SEQ ID NO: 893 - protein, 65 aa, synthetic construct
  REGION 1..65: note = Synthetic
DALERAKELAERLGDPLVEVLLYFLEQALRQTGDPKYEKLAELILELLERGVPPEEVLHLVEELG

SEQ ID NO: 894 - protein, 65 aa, synthetic construct
  REGION 1..65: note = Synthetic
DIFELMFLIMHLLKDNPELSELFREVLERLWRGEISPEEALRLLKELAREAGNPEVEELLKRVEK

SEQ ID NO: 895 - protein, 65 aa, synthetic construct
  REGION 1..65: note = Synthetic
DEEEVIEKVVRLYEEGNTFEVMHLLAKLFEETGDPRYQELLDLVFEVIKKGLSPEELEKLLRKVP

SEQ ID NO: 896 - protein, 65 aa, synthetic construct
  REGION 1..65: note = Synthetic
SEEEELLKELKKRVSPEAREYVERLLELLERGDPNFLFVLLELLFLADELGDEELKRIVEKLLKK

SEQ ID NO: 897 - protein, 62 aa, synthetic construct
  REGION 1..62: note = Synthetic
SEAKEVVRALVEEAEQRIREGKISPEEVEFLLDMARMAVENLGDPEAKKLVERLERLWRKIM

SEQ ID NO: 898 - protein, 63 aa, synthetic construct
  REGION 1..63: note = Synthetic
DEEEVFKLFFKLEEFAYRQGSEEAKKALKKFHELIEKAQHVPDPTERKKLLDSASKVAKSVIS

SEQ ID NO: 899 - protein, 65 aa, synthetic construct
  REGION 1..65: note = Synthetic
SLELLEELVELAKKGDPRVFELALEAMQLANERNDPELSELVQRIVHLITNGNPEEAEKLVEKVK

SEQ ID NO: 900 - protein, 65 aa, synthetic construct
  REGION 1..65: note = Synthetic
DEVKEVAEKAVKTGDPKLIKEALELLTKLVLKTGDPELRRLNTLLFEAVMVGDPELLKKILKEIR

SEQ ID NO: 901 - protein, 62 aa, synthetic construct
  REGION 1..62: note = Synthetic
DWRELTETLRRLVEKAKKSVEDPFVRALIEIALEAAEEASKRKDEELLHLLAEVVEELRHAS

SEQ ID NO: 902 - protein, 63 aa, synthetic construct
  REGION 1..63: note = Synthetic
SVFELSMKVMHLVAEVERNAEDPEVQKILKEVNELVREAAEKNNEELLKRAEKLVKKAKELVS

SEQ ID NO: 903 - protein, 64 aa, synthetic construct
  REGION 1..64: note = Synthetic
DDEEAKKLLDLARKALKEVNKTASPEEQKQLTDAVREAEKLLHSPDPFQREMARMLLEMVVMLG

SEQ ID NO: 904 - protein, 59 aa, synthetic construct
  REGION 1..59: note = Synthetic
DDENVKKDVKTVKDIAKKLNDERILKTLQDAERKAKENNDSRIVRDVAFKLWFQLMNVE

SEQ ID NO: 905 - protein, 62 aa, synthetic construct
  REGION 1..62: note = Synthetic
DADSFYSWLLEEALEQAKELQDPEVARMAYESAKDALEKYPDSELVRKVLKKAEELQRKLTS

SEQ ID NO: 906 - protein, 65 aa, synthetic construct
  REGION 1..65: note = Synthetic
DESLFEALLELMQVSPEAQILVEIISDLFVRGVPLEEIEKIIEEEAKKLGIPEEVLRLAKELLRK

SEQ ID NO: 907 - protein, 65 aa, synthetic construct
  REGION 1..65: note = Synthetic
SELSEEALRLLEEGNPREALKVLFELWFELVDRGDKELSELVQEIAELLIRGDPDEARKLIKELT

SEQ ID NO: 908 - protein, 62 aa, synthetic construct
  REGION 1..62: note = Synthetic
DEVEKLTTEAERVATKLERSPDPDNQFVAFMIKMAIEFALTISDKDAAKEALKSAVEMARTY

SEQ ID NO: 909 - protein, 65 aa, synthetic construct
  REGION 1..65: note = Synthetic
DEEELKELAEKLKEDPQVAVYIWALLAHLWYKTGDPEVEKVERRFEELVHRGDLETASELVKRLG

SEQ ID NO: 910 - protein, 65 aa, synthetic construct
  REGION 1..65: note = Synthetic
SLDEVEEELKKLVNDPEAERNIEFVVWMAKVANLSPEELLKLLEDSARASGDEELLRAVKELLRK

SEQ ID NO: 911 - protein, 60 aa, synthetic construct
  REGION 1..60: note = Synthetic
DDKTLTEVWQHASTLAKQKNDEFVLHFIEVMYTTAQELGDPDFKRNVEKVLRDLSKDLEG

SEQ ID NO: 912 - protein, 65 aa, synthetic construct
  REGION 1..65: note = Synthetic
SEELREELKRAVDRNDVFLVVMLLLDLSLETGDPRYEELARRIVEVDMRGDPETLRELLKLAKEP

SEQ ID NO: 913 - protein, 62 aa, synthetic construct
  REGION 1..62: note = Synthetic
EEDELRKLVEELEEKARKVITSDEEREIVERIIDDAKKALKNGDKTTVKFLAKMVEMFIRTG

SEQ ID NO: 914 - protein, 65 aa, synthetic construct
  REGION 1..65: note = Synthetic
DEEVKEILREALNLDPEEINDLIFRLWFLAVQLGDPELERVLDEIAELLQKDPEKARKLIKELLK

SEQ ID NO: 915 - protein, 64 aa, synthetic construct
  REGION 1..64: note = Synthetic
PEELVKEVEFLILMLKVIATDPEIRKDIERLEKEIRTRIKKDPRFAEEAVRRLRKILKRLVEEI

SEQ ID NO: 916 - protein, 64 aa, synthetic construct
  REGION 1..64: note = Synthetic
DEYQEKANKLYKEAEKLVKTYRSNELVKELFEIATRLLKEAREKQDPMLFAFVSMAIDALKENG

SEQ ID NO: 917 - protein, 64 aa, synthetic construct
  REGION 1..64: note = Synthetic
DFTKIAKELVDSARDLRKQNTEFAKHMVKLLSEEAKQLKSNIDDPTERKVVSEAIEEIDKLSKG

SEQ ID NO: 918 - protein, 65 aa, synthetic construct
  REGION 1..65: note = Synthetic
DKEIAELLKLLLEDPNDKEVADRLFRLLMELMHRGDPLLELVLEAAQLIEEGDPRVREVIKKVEK

SEQ ID NO: 919 - protein, 63 aa, synthetic construct
  REGION 1..63: note = Synthetic
PEEEEDVKRIIEDLLKLIQNASSEHEANFLYHMVELVVEAVNSEYAKKAHELAKKVLKELRKR

SEQ ID NO: 920 - protein, 63 aa, synthetic construct
  REGION 1..63: note = Synthetic
DEEHYRMNIDFLIWMAQTAVSLDPDVLKKITKKAEKIKKEVPDPDQVVKLLEKLVQEAVELAN

SEQ ID NO: 921 - protein, 63 aa, synthetic construct
  REGION 1..63: note = Synthetic
DDEEVKTWEKLAKEAINRIPDKDVRTEVEKSVRELIKRAHSPDPREVEFALSFVRMIIENFRG

SEQ ID NO: 922 - protein, 62 aa, synthetic construct
  REGION 1..62: note = Synthetic
DESKKIADEVKKTAEKLIKNGNVFEAMSLLATVLEKALKNNDEKLYKLVMTVAKEVFSLAKS

SEQ ID NO: 923 - protein, 52 aa, synthetic construct
  REGION 1..52: note = Synthetic
DEEFATWFVRIALENGDVELAKELAEDALKQGEISPDAADRLRKEIESVEKR

SEQ ID NO: 924 - protein, 63 aa, synthetic construct
  REGION 1..63: note = Synthetic
DSEEVKDLSKRLQEAAEKAQDPNMLDKAFKVWFQLVEAYNNNDEDKVKDASKKAKEVIKTIDS

SEQ ID NO: 925 - protein, 61 aa, synthetic construct
  REGION 1..61: note = Synthetic
DEREELAQEVAEEMIREAKHAESERHAEFYLFFAERLARAINSEETLELIKEVAREIREKG

SEQ ID NO: 926 - protein, 51 aa, synthetic construct
  REGION 1..51: note = Synthetic
SSEDVVRELLKAAKKTGDEFYVLLAEMAARWIGDEELKQRVKEAERYVREY

SEQ ID NO: 927 - protein, 65 aa, synthetic construct
  REGION 1..65: note = Synthetic
SEEEVREFVERTGDPDVKLALELIEELKRRGDPESAKIVTEMVLKLIRTGDPFLRALLRMMIENG

SEQ ID NO: 928 - protein, 61 aa, synthetic construct
  REGION 1..61: note = Synthetic
DEMKKVSEELKKDIKEALDKNDSHNLRFLIMIAKMVASTTNDEDLKKFAEKAEKILRDRES

SEQ ID NO: 929 - protein, 60 aa, synthetic construct
  REGION 1..60: note = Synthetic
DHEEEIRSVLKDLKDRASNASSDEEREFLIWFVNVFAETVPDPTARKIAKEINETLSKLS

SEQ ID NO: 930 - protein, 61 aa, synthetic construct
  REGION 1..61: note = Synthetic
RSEEDLRFRLHMIELLLRAIGVSEDEIKKINKTLEELIRKGDSETFKRIEDEVEKRVKKFT

SEQ ID NO: 931 - protein, 60 aa, synthetic construct
  REGION 1..60: note = Synthetic
DDKTLTEVWQHASTLAKQKNDEFVLWMIEVAYEAAQIYGDPHVKKEVEKSLRDLSKKLEG

SEQ ID NO: 932 - protein, 61 aa, synthetic construct
  REGION 1..61: note = Synthetic
SDEDVRSLLERIDSELKNVSNEFVKFFVELAVREAKEALKQGDKEYAEMVLKAAQEVLSVE

SEQ ID NO: 933 - protein, 65 aa, synthetic construct
  REGION 1..65: note = Synthetic
DEEVVELLKKLVNDPELEKVLEILLKLIKEGDPDAQFLLFMLKLALEVGDPDTVRSILEDILRQT

SEQ ID NO: 934 - protein, 63 aa, synthetic construct
  REGION 1..63: note = Synthetic
DEAFEAAHILAESLFIAREIGDEELIRLAEHLLELLSKAAEENDKDLVREILRLARESLKRSR

SEQ ID NO: 935 - protein, 65 aa, synthetic construct
  REGION 1..65: note = Synthetic
SEELREELKRAVDRNDVFLVVMLLMTLSFETGDPRYDELAQRILHVASEGDPETLRELLKLAKEP

SEQ ID NO: 936 - protein, 65 aa, synthetic construct
  REGION 1..65: note = Synthetic
SEELEEVLELLKRDPKKALELLFELWFEALRRGDPELLRVLEELNHLILEGDLEEAKELLKELLK

SEQ ID NO: 937 - protein, 62 aa, synthetic construct
  REGION 1..62: note = Synthetic
SETEFVKFFVDVALESAKELQDPHVAEIAVRIAEDVLKEDPTDETVRELQKKAETVRDQLKS

SEQ ID NO: 938 - protein, 65 aa, synthetic construct
  REGION 1..65: note = Synthetic
TVEELARKLLEEGRLSPEEIVEVLLRELRKLGIPPFEAALLLLKVANDLNDPELYKAVQELAERT

SEQ ID NO: 939 - protein, 64 aa, synthetic construct
  REGION 1..64: note = Synthetic
PQLDKMVKDAQDLADKIVKKASNPEIQKKAKTVKKLLEEARQKKDEQTVAELAFKAMELWFMVT

SEQ ID NO: 940 - protein, 51 aa, synthetic construct
  REGION 1..51: note = Synthetic
SADEATDSAAKAAEKGDSEYIERLLKKAKSDNIIDEFHIWFIKMLLEFARE

SEQ ID NO: 941 - protein, 61 aa, synthetic construct
  REGION 1..61: note = Synthetic
SEETITRLYKDAKKKAEDKKNEELKKTVKIAKDLLDTAKNVDDRMTKEFLETMAELALRDV

SEQ ID NO: 942 - protein, 64 aa, synthetic construct
  REGION 1..64: note = Synthetic
DPELEEAFKLTFLLLHLLMQVPDPEQQKTVETLAKLLTEAADKNDKDTLRKVKKKAKDVYSKLS

SEQ ID NO: 943 - protein, 61 aa, synthetic construct
  REGION 1..61: note = Synthetic
DPQKELHKVYETAVKRIRSIPDKEKQKEVVKEATELLRRIAKDEQEKLSAEFLSWMLKVLS

SEQ ID NO: 944 - protein, 61 aa, synthetic construct
  REGION 1..61: note = Synthetic
DPEQELRTLEKIVTEAAKDPRRSEDFFKAASRLAELIYKANDPKIQTIAREVLTKAFSIAN

SEQ ID NO: 945 - protein, 62 aa, synthetic construct
  REGION 1..62: note = Synthetic
TVEELEKLVEKLTEKVKRKDPRLSEKAQRILDQAKDLLSKAENPLLQEMIARFAVSQLQRLV

SEQ ID NO: 946 - protein, 51 aa, synthetic construct
  REGION 1..51: note = Synthetic
SMEDIVRELLKAAKKTGDEFYVMMAEMVAREIGDEELKQRVKEAERYVREY

SEQ ID NO: 947 - protein, 63 aa, synthetic construct
  REGION 1..63: note = Synthetic
DKSDAQRILFEAWFLVVELGDEELEKEVDRLQKEFLEADKKNDKDLLDEITRQAEELLKRIKS

SEQ ID NO: 948 - protein, 63 aa, synthetic construct
  REGION 1..63: note = Synthetic
DLEKLKKDAKKALEILKKLNNEFLVWFLENLVKALEMAIRKNDEHVVKEVSKAIQEIIERLQK

SEQ ID NO: 949 - protein, 63 aa, synthetic construct
  REGION 1..63: note = Synthetic
DEEELKKVAETAKTVAKQKNNEEVLKAIKEMATEAEKLIKSSNPRDQMNAEFIIWMLRVLIED

SEQ ID NO: 950 - protein, 63 aa, synthetic construct
  REGION 1..63: note = Synthetic
NEQEKRNASFLLEMAKMLADFISNDDLRKKAQSLVEKARKIDDPNVAKKVYKIVSTIFERVVK

SEQ ID NO: 951 - protein, 62 aa, synthetic construct
  REGION 1..62: note = Synthetic
FEDAEFILWFAKALVESVGDEDALEKLKEFEKKVTEAIKNNDEEKVRKLLSKAEELAERVLQ

SEQ ID NO: 952 - protein, 64 aa, synthetic construct
  REGION 1..64: note = Synthetic
DEHLKKLEKKVRTLLEKARKNNDEEVMFLLFFAELSIEMVKMNPEAKEDAQKTVEDLLKQAEST

SEQ ID NO: 953 - protein, 61 aa, synthetic construct
  REGION 1..61: note = Synthetic
DEESSRAAKDLLKKAKEAVERNDSQTVSFLLWMVKAVAQNAGDEEVEKSVSELEKLWKKIS

SEQ ID NO: 954 - protein, 61 aa, synthetic construct
  REGION 1..61: note = Synthetic
DEVEKLLREANELAFKLLSDDWRAFDLLQTLARIADEANLSGDKETASKLLKTIIELLKRG

SEQ ID NO: 955 - protein, 63 aa, synthetic construct
  REGION 1..63: note = Synthetic
DPSEEAQKLVDKVKEDVKKKNDEDAEEAVKIAEELLKAAKNAQDPRDREFLVLIIKMMVENLS

SEQ ID NO: 956 - protein, 65 aa, synthetic construct
  REGION 1..65: note = Synthetic
SEEEYKKKIKELLRRGDAFEAALLAMEAFFRLGDPRFEEILRIIHELFERGISPEEIVEILERLE

SEQ ID NO: 957 - protein, 62 aa, synthetic construct
  REGION 1..62: note = Synthetic
DWRELTETLRRLVEKAKKSVEDPFVRWMIEALLDAAEFASKNKDEEMLKLIAEAVEDLRHLS

SEQ ID NO: 958 - protein, 65 aa, synthetic construct
  REGION 1..65: note = Synthetic
TEELIKLVKELAKRNPEEAKKVVEELVKLLGLDPLAERMLKELVEEYYRTGDPFYLFMFEVLVRN

SEQ ID NO: 959 - protein, 62 aa, synthetic construct
  REGION 1..62: note = Synthetic
DELEKVVKELSTDADKAVKNGDKDKVKFLVWFLKSVVEFDPDNPAAKLAKKVIEKLEKLIKS

SEQ ID NO: 960 - protein, 65 aa, synthetic construct
  REGION 1..65: note = Synthetic
SEEIKRLVELVKKGDPEALKRLRELLEELKKKGDPRAFLLWFVIVALEAGNPDIAKEVAEQIERR

SEQ ID NO: 961 - protein, 63 aa, synthetic construct
  REGION 1..63: note = Synthetic
DPSEEAQKLVDKVKEDVKKKNDEDAEEEVKIAEELLKQAKNAQDPTEREFLVEMIKMLVKQLS

SEQ ID NO: 962 - protein, 63 aa, synthetic construct
  REGION 1..63: note = Synthetic
QEEYKRLLEELLRKAQKAVKNNDQHEVSFLAWFITISAENVEDEDVSKHFLELAKELHKFVNS

SEQ ID NO: 963 - protein, 60 aa, synthetic construct
  REGION 1..60: note = Synthetic
DRDEQLKKAIKDLLEQLKKASSRHEASFLIWFIRLLREDAQTPEVRTLATEADKIYKKLT

SEQ ID NO: 964 - protein, 62 aa, synthetic construct
  REGION 1..62: note = Synthetic
DEWQELSKIVKSLIDELKKSPDPKDQFAAAMAEMAWEMAERAQDPNVRREALKTAIEMVRDT

SEQ ID NO: 965 - protein, 61 aa, synthetic construct
  REGION 1..61: note = Synthetic
DPFTAMSLVARVFKLALEKNDEELQKEAETLMEIVIKAAQNNDEEAVKEVIKRAKELLSKS

SEQ ID NO: 966 - protein, 64 aa, synthetic construct
  REGION 1..64: note = Synthetic
DDTKKLHDTVTKYAQEVLKRARDEDVKKVIEELLRDAQEVIKNHDEETAKFLYLMIQLASKQAI

SEQ ID NO: 967 - protein, 64 aa, synthetic construct
  REGION 1..64: note = Synthetic
TEDYEKVKRELEKVEEEAKRKNNLEALFLVFMAKLSLEAFNLDPDNKDQIISVAKDLLKLAKNS

SEQ ID NO: 968 - protein, 55 aa, synthetic construct
  REGION 1..55: note = Synthetic
SVFELALKAMEAANRKGDEDAMRKIIKIVQLASDGKIDESQASTRLRRILKKLRS

SEQ ID NO: 969 - protein, 65 aa, synthetic construct
  REGION 1..65: note = Synthetic
SALEEAERLARELGDEDLLFLLAMVKMARSTNPEVAKELLEEAVKLAEELGDPDLLKLLRLALKE

SEQ ID NO: 970 - protein, 65 aa, synthetic construct
  REGION 1..65: note = Synthetic
TFEERVKEALERNDPDLVKNIIFEAVMELLKRDTEKAQRVAELAVELLKEGDPDKLRELARRADK

SEQ ID NO: 971 - protein, 63 aa, synthetic construct
  REGION 1..63: note = Synthetic
DDETKELQNEAFKAVMIVMQLNDPRLEKVVRDVQTRFEEAQKHNDEETSKKVLKKLVEIVRKT

SEQ ID NO: 972 - protein, 62 aa, synthetic construct
  REGION 1..62: note = Synthetic
SEEKEVVRHLVEDAEQRIREGKISPEEVEFLLMLARMVVENLGDPEAKKLVERLERLWRKIM

SEQ ID NO: 973 - protein, 64 aa, synthetic construct
  REGION 1..64: note = Synthetic
DEEEKKEKTLDKLLSEAKKKSSQNPEVQFLAWMLEMLVEQFKLVPDPEIRKEIYKAASDLYKQT

SEQ ID NO: 974 - protein, 63 aa, synthetic construct
  REGION 1..63: note = Synthetic
AELAFKAMSLAAQLAKALLDGDEDKVKTARSLLDKVEKEVKKQNDEEVLKFVQSLKKTAEDVT

SEQ ID NO: 975 - protein, 63 aa, synthetic construct
  REGION 1..63: note = Synthetic
NEDEKRNAEFLLWFAKVLADSISDDDGRKKAQSLVEKARKLDIPEVAKKVYKIVKTIFERDVK

SEQ ID NO: 976 - protein, 64 aa, synthetic construct
  REGION 1..64: note = Synthetic
DVFTVALKVIEILNRLINNAEDERIKKLLETVSRLVVEAAERNDEKLVRDLYKTLEKLVRELRS

SEQ ID NO: 977 - protein, 64 aa, synthetic construct
  REGION 1..64: note = Synthetic
DESEKFQTVVKELEDLVHSVEDPTRRKKARNIAFKLVMKLMNAEDPKEFKETVDKAKEIVKKAA

SEQ ID NO: 978 - protein, 64 aa, synthetic construct
  REGION 1..64: note = Synthetic
PLEEQLRELLEKAFEAWAKIRDPEEAETFVEKFQTLEKQFRNASSEEEKKKVVEKIKKLIDSVL

SEQ ID NO: 979 - protein, 65 aa, synthetic construct
  REGION 1..65: note = Synthetic
SEIEEVLEKLKRLSPEISFFVWFIEVALRNGNPEVALKLARDVLERFGDPLVKELLELIEKLVRK

SEQ ID NO: 980 - protein, 61 aa, synthetic construct
  REGION 1..61: note = Synthetic
DDKERLRKLVDDLIRKAKEVKDPETVRNLLFQAIMAAMLINDPELEKKVKEVFKEIKKKVS

SEQ ID NO: 981 - protein, 64 aa, synthetic construct
  REGION 1..64: note = Synthetic
DEEEKLQTVIKELEDLVKSVEDPTRRKKAHEIAFKLVMKLLQAEDPKEFKETVDKAKEIVKKAA

SEQ ID NO: 982 - protein, 63 aa, synthetic construct
  REGION 1..63: note = Synthetic
DIDEKLDSLVKKAKRYVDETNSDELKEEVSIAEELVRRAKNASDPNDKRFLTWMVEAIYELVI

SEQ ID NO: 983 - protein, 61 aa, synthetic construct
  REGION 1..61: note = Synthetic
DPKKLDELRKKIETLLRKVTDPFAKEAVKAALELAEEALKKQDPFLEFFARMAYEFAKEMQ

SEQ ID NO: 984 - protein, 62 aa, synthetic construct
  REGION 1..62: note = Synthetic
SEESEKVKRWVETELTKANKQNDYRKAINIVFTAAMLAMQLNDEELEKWVKSLAKEVMSKKR

SEQ ID NO: 985 - protein, 63 aa, synthetic construct
  REGION 1..63: note = Synthetic
DPKEELERVTKTAQKTVTELNDEFALFMVNNLVEFAEEAVRNNDEELAKTVIRALQETFKNMM

SEQ ID NO: 986 - protein, 59 aa, synthetic construct
  REGION 1..59: note = Synthetic
GEFYIMMVELALQTVRELSGDEEFIKRVRKRLKEVKERGDDSKLEEISREVVEYIERVL

SEQ ID NO: 987 - protein, 62 aa, synthetic construct
  REGION 1..62: note = Synthetic
DLEKEAKTVVTLLKRLKKQVTNPDVKKLVDEVAKSVETAVKKKDEDKIKSLVFEAQILIFAI

SEQ ID NO: 988 - protein, 64 aa, synthetic construct
  REGION 1..64: note = Synthetic
DLHKEAFKVWFEAVELIFKVQDPHIRKLLEHLAKILQEAANKNDEELIKKILKLVQKVIKEARS

SEQ ID NO: 989 - protein, 54 aa, synthetic construct
  REGION 1..54: note = Synthetic
SIEDIAHKIISLALELGDFDALSQAAEVLEKWLSGKISPEQAKKLADRIRKILE

SEQ ID NO: 990 - protein, 61 aa, synthetic construct
  REGION 1..61: note = Synthetic
DPFTAMELVARVMELAIEKNDEELQKEARTLMEIVLKAARNNDEEAVKEVIKRAKELLSKS

SEQ ID NO: 991 - protein, 59 aa, synthetic construct
  REGION 1..59: note = Synthetic
TEEEKKAKKWVEKLVEKAGLDDFYKEMAKLVFEDAVLQGVSTKEARKIVKKVIKEARNV

SEQ ID NO: 992 - protein, 60 aa, synthetic construct
  REGION 1..60: note = Synthetic
DKREEVHTLLEILAEAAEKRDEETIRKVASRAQKLAKEIGDEFLLSFIQMLFEYAQQLLS

SEQ ID NO: 993 - protein, 65 aa, synthetic construct
  REGION 1..65: note = Synthetic
GELAKRALELIERGDLDEVFKLWFEIVERANRTKDPELEELLRLIHLAAQGDPEAKKELEKIIRK

SEQ ID NO: 994 - protein, 64 aa, synthetic construct
  REGION 1..64: note = Synthetic
SELLEEAFEIWFKVVEIAYKLNDPDKQRLAEEVTRLIETAMNVPDPTQVKKLVTKAKEIFKKVK

SEQ ID NO: 995 - protein, 65 aa, synthetic construct
  REGION 1..65: note = Synthetic
DEEELLREVVERFKDDPFHVAFLLLEIAERRNDPELAELISEVIEEVSQKGLPPEELLRLVLELK

SEQ ID NO: 996 - protein, 65 aa, synthetic construct
  REGION 1..65: note = Synthetic
DFEELLEEARREGDPRTLVFLIALLALQRGDPELVREIEEVEELIHRGELPPEELRRLAEELIKK

SEQ ID NO: 997 - protein, 65 aa, synthetic construct
  REGION 1..65: note = Synthetic
SVELLFEVWFLIAQLGNEEVLRLLEIFAEAAIRGDPDLLEKVERRIEELSKTDPAARLVLEAIRG

SEQ ID NO: 998 - protein, 61 aa, synthetic construct
  REGION 1..61: note = Synthetic
DEFLIMLAKMLLEFARNNGLLTPDEAEKWKKLLEEVRKRGDDNQIRKIYEEIVELVERLAG

SEQ ID NO: 999 - protein, 61 aa, synthetic construct
  REGION 1..61: note = Synthetic
SEETITRLYKDAKKKAEDKKDEELKKAVKDAKDLLDTAKNVDDEMEKKFLEWFAEVLLRAV

SEQ ID NO: 1000 - protein, 63 aa, synthetic construct
  REGION 1..63: note = Synthetic
DIDEKLDSLVKKAKRYVDETNSDELKEEVSVAEDLVRRAKNASDPNDKRFLTFMVELIYELVI

SEQ ID NO: 1001 - protein, 65 aa, synthetic construct
  REGION 1..65: note = Synthetic
DLEEKAKEAYEEGDLELLVFLVLMILMEKGDPRLEELLKLAEEVKKTNDPELRKELRRLAYELIP

SEQ ID NO: 1002 - protein, 51 aa, synthetic construct
  REGION 1..51: note = Synthetic
SADEASDSAAKAAEKGDSEYIERLLKKAKSDNIIDEFHIWFIKMLLEFARE

SEQ ID NO: 1003 - protein, 62 aa, synthetic construct
  REGION 1..62: note = Synthetic
SDSDEISSAVETLLKQAKDAPDPTDAEMLLWFAKVLVDYLNNDELRKKVEKASKEVEKINRS

SEQ ID NO: 1004 - protein, 62 aa, synthetic construct
  REGION 1..62: note = Synthetic
DESKKIADEVKKTAEKLIKNGLVFEAMSLLATVLEKALKNNDEKLYKLVMTVAKEVFSLAKS

SEQ ID NO: 1005 - protein, 63 aa, synthetic construct
  REGION 1..63: note = Synthetic
NEKEKMDAQFLLWFAKVMADNISDDDKRKKAQSLVEKARKLDIPEEAKKVYKIVATILERDQK

SEQ ID NO: 1006 - protein, 63 aa, synthetic construct
  REGION 1..63: note = Synthetic
DPESDAKRIATELATLAKKLDPEESRKVFDTAFTIAMRLLSSSDPNDQKKAQIIAEVFNKLAT

SEQ ID NO: 1007 - protein, 62 aa, synthetic construct
  REGION 1..62: note = Synthetic
SSELRDRLKKTFQELLKRGVSPWQAFEIIEKLLEELFRKGKLDVDVAFEVMHILAELMRKWE

SEQ ID NO: 1008 - protein, 64 aa, synthetic construct
  REGION 1..64: note = Synthetic
DRTEKDQTVIKELMDLVKSVEDPTKRKKANDIAFKLVMKLLKAEDPKEWKEIVDKAKEIVKKAG

SEQ ID NO: 1009 - protein, 64 aa, synthetic construct
  REGION 1..64: note = Synthetic
NEEVKKEIKSLEKTVSTLASKDPFALFMAQVLIEFAKEGLKKGDEEDVKEANSIVRDIIKRLQS

SEQ ID NO: 1010 - protein, 61 aa, synthetic construct
  REGION 1..61: note = Synthetic
DPKKLDELRKKIETLLRKVTDPDAKEIVKDALELAEEALKKQDPFYEWAARVLYELAKQLQ

SEQ ID NO: 1011 - protein, 63 aa, synthetic construct
  REGION 1..63: note = Synthetic
DDEEVKTWEKLAKEAINRIPDKDVRTEVEKMVRTLIKRAHSPDPNEVEFALLMVALIIETFRG

SEQ ID NO: 1012 - protein, 63 aa, synthetic construct
  REGION 1..63: note = Synthetic
NEEEKKKAKKLLDEAKKLADQISNDDLRKDAQSNVERARKIDDPRDAKFVYFFVKLIYEFVQS

SEQ ID NO: 1013 - protein, 62 aa, synthetic construct
  REGION 1..62: note = Synthetic
DETQKRQVEKYVRTIEKLLKDAKDPKEITELLEKALTYLERVNSELAMEAMYRLMEVYFEAT

SEQ ID NO: 1014 - protein, 61 aa, synthetic construct
  REGION 1..61: note = Synthetic
NEELLTKFVLEFAQSLAQRASSQEEVDKISKEAQKILKELNVDPRLVEKVSRLVQEYYKKS

SEQ ID NO: 1015 - protein, 63 aa, synthetic construct
  REGION 1..63: note = Synthetic
NEEEKRHAEFLLEFAKMLADNISDDDGRKKAQSLVEKARKLDIPEVAKKVYKIVTTIWHRDQK

SEQ ID NO: 1016 - protein, 62 aa, synthetic construct
  REGION 1..62: note = Synthetic
PKEELEKLVRTLEELVKKKVRDPFVKWMADVTVTFAREAVKSGDKDLATMVIEDLKELLKTI

SEQ ID NO: 1017 - protein, 55 aa, synthetic construct
  REGION 1..55: note = Synthetic
DIMSLAFEAMELANKNGDEDAMKTIQKLFELFDEGKIDPTQVQRILRKIAKRLKG

SEQ ID NO: 1018 - protein, 65 aa, synthetic construct
  REGION 1..65: note = Synthetic
SEVEELLEKAKRTGDPRLASRAIFLVLMELLKRDPEEVQRVQEELLRLLKEGDLEELERLLRKVQ

SEQ ID NO: 1019 - protein, 65 aa, synthetic construct
  REGION 1..65: note = Synthetic
SEVLKELKRLLEEGDPEEALRLAERLLKEAKEKGDEELAFILWFVIVALRQGNPEAIRVARELVR

SEQ ID NO: 1020 - protein, 65 aa, synthetic construct
  REGION 1..65: note = Synthetic
DKEELKEELEKLIGDPDAAELLLHYIEAVRRGEDPPERVEALVEFIVKIAGLPPEVEKRLRELAR

SEQ ID NO: 1021 - protein, 61 aa, synthetic construct
  REGION 1..61: note = Synthetic
PHVENLVFTLVMKAMEAINKNDEDTLKKLKDTLDELVKKDPRFTEAAKLAKKLIKEQEELT

SEQ ID NO: 1022 - protein, 64 aa, synthetic construct
  REGION 1..64: note = Synthetic
DPVEFLSWMAETAISLLEELGLLSKEELQKWKEIVRKLTERGDTENLEKVLDKITEIIEKLQKS

SEQ ID NO: 1023 - protein, 64 aa, synthetic construct
  REGION 1..64: note = Synthetic
KEEVNNQAFKLVMEAMELANSSDPNNRTKAKELIKEAKKLAKEVNNPEVEDTVREVEESIKKVG

SEQ ID NO: 1024 - protein, 62 aa, synthetic construct
  REGION 1..62: note = Synthetic
DEFTEIVKELVKLAEEAVKKNDEDSVKFIEAMLKMMKEAATDPKQRELADRAIKKVQKLLKS

SEQ ID NO: 1025 - protein, 64 aa, synthetic construct
  REGION 1..64: note = Synthetic
DEHLKKLEKKVRTLLEKARKNNDMKVAFLLFMAELDIELVKLNPEAKEEAQKSVEELLKQAEST

SEQ ID NO: 1026 - protein, 61 aa, synthetic construct
  REGION 1..61: note = Synthetic
DPFTAMELVARVLQLAIEKNDEELQKEAHTLMEIVIKAAKNNDEEAVKEVIKRAKELLSKS

SEQ ID NO: 1027 - protein, 65 aa, synthetic construct
  REGION 1..65: note = Synthetic
DEVERVVELLKRLGDPVARELAELIEEILKRNEEMARSAASSAEMALKKNDPESLKFLITLLKMV

SEQ ID NO: 1028 - protein, 63 aa, synthetic construct
  REGION 1..63: note = Synthetic
DIDEKLDSLVKKAKRYVDETNSDELKHAVSSAEELVRRAKNASDPNDKRFLTAMVEMLYDFVI

SEQ ID NO: 1029 - protein, 63 aa, synthetic construct
  REGION 1..63: note = Synthetic
DDSEEITKLLDDLVTKAKKKIKDPQLQLKAEVLAWFAKVAASSPDPEAKKVAKELVKELQKLV

SEQ ID NO: 1030 - protein, 61 aa, synthetic construct
  REGION 1..61: note = Synthetic
DPKKLDELRKKIETLLRKVTDPDAKEAVKMALELAEEALKKQDPFYEWFARVAYEWAKELQ

SEQ ID NO: 1031 - protein, 63 aa, synthetic construct
  REGION 1..63: note = Synthetic
SDEDEIFTLAMLAMEAIFKAAKTEEEFERLMKKLQDVIEKAQQLDPSQQKKLLKEVLDEVKKL

SEQ ID NO: 1032 - protein, 55 aa, synthetic construct
  REGION 1..55: note = Synthetic
NEVFELALKALHVAFKVGDEDALKLIQKIAEKVSDGKLDEKQASKLLKSLIKKLE

SEQ ID NO: 1033 - protein, 63 aa, synthetic construct
  REGION 1..63: note = Synthetic
DVDTEALRAAEDMIELLKNAKDPTEAKFAKTMVELLVELVKDPEARKIIQKKLKEAEEYVNKL

SEQ ID NO: 1034 - protein, 59 aa, synthetic construct
  REGION 1..59: note = Synthetic
GEFYIEMVEMALDMVRMLSGDEEFIKRVRKRLKEVKERGDDSKLEEILREVTEYVERVL

SEQ ID NO: 1035 - protein, 63 aa, synthetic construct
  REGION 1..63: note = Synthetic
DAFDALSILAEAAELVRKLGDEELKKEVDRLLEEFTEAARNNDKDLLDEITRQAEELLKRIKS

SEQ ID NO: 1036 - protein, 64 aa, synthetic construct
  REGION 1..64: note = Synthetic
DDDSYKKKVEDTLESLIKKAKDPLARKVIEELARDAKKAVDNGDKEKVEFLVLLAKLVADNAAS

SEQ ID NO: 1037 - protein, 62 aa, synthetic construct
  REGION 1..62: note = Synthetic
TDAKEIIKDLKKRFEEAVRRGVDPRQAEFLVKMVEMLAEDVGDEEVKEVVKELRKRLKELKT

SEQ ID NO: 1038 - protein, 62 aa, synthetic construct
  REGION 1..62: note = Synthetic
DELEKMVKRISTEADKAVKNGDKHEVEFLVFFLKLVVEDDPSNPAAKLAKKVIEKLEKLIKS

SEQ ID NO: 1039 - protein, 65 aa, synthetic construct
  REGION 1..65: note = Synthetic
SVSELLSEAASKNDPRLLEEAVELLVKELGLSPEEEERLRRLVREALKRGTLFEVVMELMTLANR

SEQ ID NO: 1040 - protein, 62 aa, synthetic construct
  REGION 1..62: note = Synthetic
DPREAEELAKKVEEVASKRGDEVMLRAVEEIKKLIETAKKSPDEFYRSFVDMASDFLKEITS

SEQ ID NO: 1041 - protein, 62 aa, synthetic construct
  REGION 1..62: note = Synthetic
DELEKVVKRLSTEADKAVKNGDKHEVEFLVWMLKAVVDFDPDNPAAKLAKKVIEKLEKLIKS

SEQ ID NO: 1042 - protein, 62 aa, synthetic construct
  REGION 1..62: note = Synthetic
SEEKEVVRALVEEAEQRIREGKISPHEVEFYLWFAAVAVELLGDPEAKKLVERLERLWRKIM

SEQ ID NO: 1043 - protein, 65 aa, synthetic construct
  REGION 1..65: note = Synthetic
SLEEELKRLISERLGVPPEFVEEIVEFDSEELKVPPEEALLELAKAVARLFRDPELEELIRRLEK

SEQ ID NO: 1044 - protein, 63 aa, synthetic construct
  REGION 1..63: note = Synthetic
NNEAQFLLWMVQMLVEAAKLDPDSAEELSEAIKDLLKRIRKLGDEDASKKATELLKEAEKVIS

SEQ ID NO: 1045 - protein, 65 aa, synthetic construct
  REGION 1..65: note = Synthetic
DEEEEKLEELIRRGNTEEAKKIVEKIVKELGLDPFEEWFLKLLVENAKVDPLVLEVLKRALKELR

SEQ ID NO: 1046 - protein, 63 aa, synthetic construct
  REGION 1..63: note = Synthetic
SKDEKLHDKLFKLWFLLVNLHTEEAKKLSKKVHTAAEKASTLSPEERRRLLEKVAKEAEKLIG

SEQ ID NO: 1047 - protein, 61 aa, synthetic construct
  REGION 1..61: note = Synthetic
DESLAKLVFTLMSLLAEAFKYDPDSAETAMELLMKAARNNDEEQLKKAVDYAKKVVDRVLS

SEQ ID NO: 1048 - protein, 64 aa, synthetic construct
  REGION 1..64: note = Synthetic
DVQQEAKFVIARLAMLALHVDDPEQRKTVFKLMLLLADAVERGDRELLKKVIKTARDVISKVNS

SEQ ID NO: 1049 - protein, 65 aa, synthetic construct
  REGION 1..65: note = Synthetic
SEIEEVLELIRRYDPEVVKELEKVLRALKRSGVSPEKILKYLLIVAHFLGSPLAVRLLFRLMTKR

SEQ ID NO: 1050 - protein, 65 aa, synthetic construct
  REGION 1..65: note = Synthetic
SLEELERLIRKLVKEGDPAARRALLVLESLKRRGVSPEEIVRRLIAFLFILGNPELIRLAIRLFL

SEQ ID NO: 1051 - protein, 65 aa, synthetic construct
  REGION 1..65: note = Synthetic
DLLEKAKKVAREILDPEVVRIFELAVEVLKKKGANPSSILIAVLRLLRRRGVDPELLREVFRRAR

SEQ ID NO: 1052 - protein, 65 aa, synthetic construct
  REGION 1..65: note = Synthetic
DEREELIELILRNLDDPEKVHELLKRLLELAEELGDRRLYRYVMLIFWALRRNPERAERLLRKLK

SEQ ID NO: 1053 - protein, 65 aa, synthetic construct
  REGION 1..65: note = Synthetic
PELIEEALELLKEGDPKKVFRVLARLVQLLREKGDPRYRLVLLILAYVRFGNPEAARQLLRIVLK

SEQ ID NO: 1054 - protein, 65 aa, synthetic construct
  REGION 1..65: note = Synthetic
DELREILREALEKGDPELVKELLELLARLADETGDPKLRIVIAYVWFAKKKNDPRLLKTALQVLK

SEQ ID NO: 1055 - protein, 65 aa, synthetic construct
  REGION 1..65: note = Synthetic
DDERLARLAFRVLIKRAGVPDFDVKVTNGKVRVTITGRDQASQEALQLVFALARRLGLQVQIDTR

SEQ ID NO: 1056 - protein, 65 aa, synthetic construct
  REGION 1..65: note = Synthetic
DDERLATLAFRALIKRAGVKNLDVKVTNGKVRVTITGRDQASFKALQLVFALARRLGLQVQIDTR

SEQ ID NO: 1057 - protein, 65 aa, synthetic construct
  REGION 1..65: note = Synthetic
SELAEEILELIEKGDPRVRKLILELLKELKERGDEKRFKLLVRVWFLLRSGNPELAKQLLKKIKK

SEQ ID NO: 1058 - protein, 65 aa, synthetic construct
  REGION 1..65: note = Synthetic
DKAREFLRAAAKYGDPSAKRALKLLEELRKRGIPPEEALKIVVEFLRKAGNPRLARVVEEALKDE

SEQ ID NO: 1059 - protein, 65 aa, synthetic construct
  REGION 1..65: note = Synthetic
SLIEEILKEVRKKNPRVVYILERLLRRLKEDGVPPEKILRILIAAAKRLGDPEASELLRRALKRK

SEQ ID NO: 1060 - protein, 65 aa, synthetic construct
  REGION 1..65: note = Synthetic
SVEELVKRILELLKEDEHRALRRLVVLLLNRGISPEEIARIALRVLKLFKRDPEKARELIEKVLR

SEQ ID NO: 1061 - protein, 65 aa, synthetic construct
  REGION 1..65: note = Synthetic
SELFREAIELLEEGNPEEARRVLLRLAIRLAQEGDPRRRAVALAYFYLKTGNPKEAAQLLEEARR

SEQ ID NO: 1062 - protein, 65 aa, synthetic construct
  REGION 1..65: note = Synthetic
SLKRIVVILLLEAGVSPRDIARLFRIIDELKERGVSPEEILKILIKILEELGDPRAAKLLRKLLK

SEQ ID NO: 1063 - protein, 65 aa, synthetic construct
  REGION 1..65: note = Synthetic
DETEEKAKRVSQYARNLGIEDVSISFHDNRLRIRVGGDDEKARRARRQIVRIAIQLGFRVLVITK

SEQ ID NO: 1064 - protein, 62 aa, synthetic construct
  REGION 1..62: note = Synthetic
DLRDEFFRLLLTAIEIAKNVPDPRKASKIRILVAHVYFKARTLSKEQRVKLARELVDKAKKE

SEQ ID NO: 1065 - protein, 65 aa, synthetic construct
  REGION 1..65: note = Synthetic
DLSETVSKLASEVAKKVGVPSWEVRVHNGKVIVTLKGQDRAARRAMLLIRRIAEKLGVPVRVLVL

SEQ ID NO: 1066 - protein, 62 aa, synthetic construct
  REGION 1..62: note = Synthetic
DIVELLTTHAERVATKLERSPDPRNKKVAKFIKTLIKKAKSVPDKDKSLRILAMAFFFAKRF

SEQ ID NO: 1067 - protein, 65 aa, synthetic construct
  REGION 1..65: note = Synthetic
NEELEKRVEELIKRIPNPKLRKVLRLLLKRLKEGDPKAAALLEILLAVFERGDPFRLILILKRVK

SEQ ID NO: 1068 - protein, 65 aa, synthetic construct
  REGION 1..65: note = Synthetic
DKQHRAVALIRLVARRLKVPDVSVDVRNGRVTVRFGGTDERVRQAFLLARLIAKHVGVPIDVKVK

SEQ ID NO: 1069 - protein, 65 aa, synthetic construct
  REGION 1..65: note = Synthetic
GPLERTARELAKELGIPPEDIERVLEVLERILGDPRRALWFLASLLTRAKKDPYVRELLKALIRL

SEQ ID NO: 1070 - protein, 65 aa, synthetic construct
  REGION 1..65: note = Synthetic
SEQETASRLIKEAADRLGVSDVKVDVRNGTLRVTVRGNNESAQQLATFVLQIATQLGVRVLVLFR

SEQ ID NO: 1071 - protein, 65 aa, synthetic construct
  REGION 1..65: note = Synthetic
DKERIFARALRALARRAGVPSVRVEVSNGKVTVSVKGKDRIARLFAQLVYNLARRFGIDVDVQLR

SEQ ID NO: 1072 - protein, 65 aa, synthetic construct
  REGION 1..65: note = Synthetic
DDWRRILARALLLAKELGVPRVVVVRIDGRWVVLVKGDNESAKKLITILKKWFEKKGDEVRVQIS

SEQ ID NO: 1073 - protein, 65 aa, synthetic construct
  REGION 1..65: note = Synthetic
DVTEKLKKLITEAAKRAGVPSVEVTELRGKVLVRFRGRDRSVLRAALLARRLADKFNVPLRVIFH

SEQ ID NO: 1074 - protein, 64 aa, synthetic construct
  REGION 1..64: note = Synthetic
DKLATRAIRLALQAHLQARQRGTPVRIHLSFKGFTIDVTVTEDPRSLERAIRLLILFLRRSSEN

SEQ ID NO: 1075 - protein, 64 aa, synthetic construct
  REGION 1..64: note = Synthetic
DPTSFRLVMEISLVLQLFKKGEIDPSQAKTLLKRLQEKAKKIGDRFAVVLAEFAIRVIKKAEKS

SEQ ID NO: 1076 - protein, 65 aa, synthetic construct
  REGION 1..65: note = Synthetic
SLERIVRAAIEKAARRLGVPDVKVSVRNGTVHVKVRGSDRAALAAKIFAWNIARRLGVPVSVTIR

SEQ ID NO: 1077 - protein, 65 aa, synthetic construct
  REGION 1..65: note = Synthetic
SREKAFASYVRQVAKRAGVPSVDVKVSNGKVTVTLDGDDERARQAELLIRWFSRHLGVPVTVKKK

SEQ ID NO: 1078 - protein, 60 aa, synthetic construct
  REGION 1..60: note = Synthetic
SDDQEKLERIVHAIVRHFGLSPEWEKRLKKVVRELLKKGVDPEQIVKIVVKIAIRVHNQK

SEQ ID NO: 1079 - protein, 65 aa, synthetic construct
  REGION 1..65: note = Synthetic
SEELVKKVEELVKKTGDPLLKLLLEILKRLLKLNTPLARVLIDLILLLIDAGDREKLERAIRRLR

SEQ ID NO: 1080 - protein, 65 aa, synthetic construct
  REGION 1..65: note = Synthetic
DKELLEEAIKLLKEGDPEKARKVLLELAREAHERNDPKLYRAIALVYFYLRSNPRLAIQLLELLT

SEQ ID NO: 1081 - protein, 65 aa, synthetic construct
  REGION 1..65: note = Synthetic
DVERLVRAAVRKAAKKLGLPHWHVSVSNNTVRVQVRGRDKAALALLIFAWNIARAFGLKIELRHQ

SEQ ID NO: 1082 - protein, 65 aa, synthetic construct
  REGION 1..65: note = Synthetic
PRRIEDALRSLLNSPNPELRLLAKVAIELLKRGVSPRRIALIIRRLADRLGLSPRVLRLVLIAVL

SEQ ID NO: 1083 - protein, 65 aa, synthetic construct
  REGION 1..65: note = Synthetic
SKDEKARRLVLRILLEVGLKRFVVLVRNGRILVVIRGSDERAQTATKLVRTLAKKLGLEVRVLIV

SEQ ID NO: 1084 - protein, 65 aa, synthetic construct
  REGION 1..65: note = Synthetic
DRRRRFISRVLTIAKQLGVPRVIIIVNDGRVTVRVRGDTEKARTVQKFAQKVAEELGLDVDVQVR

SEQ ID NO: 1085 - protein, 64 aa, synthetic construct
  REGION 1..64: note = Synthetic
DKLAVRAIRLALQAFLRARLRGTPVRIHLSFKGFTIDVTVTEDPRSLQRAVRLLLLFLRRSKEN

SEQ ID NO: 1086 - protein, 55 aa, synthetic construct
  REGION 1..55: note = Synthetic
SFEEVIHRALMVAFVEGDKKAFRILTKILELARQGKMSEEQAEKRARRIEEKLRK

SEQ ID NO: 1087 - protein, 60 aa, synthetic construct
  REGION 1..60: note = Synthetic
DERKKVDAFLRFVIVRVFFVKDPETKKDILRKLQEFAEQISDEEAKKKAQKVWELLTRLS

SEQ ID NO: 1088 - protein, 65 aa, synthetic construct
  REGION 1..65: note = Synthetic
SVEERIEELKKEGDPKKALILELALELLKRIPPARVYALLLALARRLGVPPRDVARLLFIALQAK

SEQ ID NO: 1089 - protein, 65 aa, synthetic construct
  REGION 1..65: note = Synthetic
DRALEIARSVLRIANEAGVPRLRVFVSKNTVRVRVEGDDDAAKRAKKLVEEYAKKLGLKVTVTKK

SEQ ID NO: 1090 - protein, 62 aa, synthetic construct
  REGION 1..62: note = Synthetic
DYRTLFLQIWMVATTLAKEAKSEEDVKKAEKKLQEWLDKLNVNKLLQAIARRILRRVYKQLS

SEQ ID NO: 1091 - protein, 65 aa, synthetic construct
  REGION 1..65: note = Synthetic
DKDLKELYKELRKKLSPEEVVKIVFKVIEEKFGDPRRAFAALYLVLRSLGIDPEEVRRLIRWAFI

SEQ ID NO: 1092 - protein, 65 aa, synthetic construct
  REGION 1..65: note = Synthetic
SEEELIEKVERVVGDPALRQMLRQMIEWLKKQGVDPKEAVVLAAFALARHLGDPELRKVAREVLK

SEQ ID NO: 1093 - protein, 64 aa, synthetic construct
  REGION 1..64: note = Synthetic
DPTRHRLLLRIFMVLVLFKKGKIDPSQAKTLLKRLQEKAKKIGDEDAVFAAKQAIDFIKRAEKS

SEQ ID NO: 1094 - protein, 65 aa, synthetic construct
  REGION 1..65: note = Synthetic
SLKELAREARRRGNPDVAFLVMLARYARKLGLPPKTIKKLLERQAKRRGIPPESLEEAKEIVEKG

SEQ ID NO: 1095 - protein, 65 aa, synthetic construct
  REGION 1..65: note = Synthetic
SERVAKIALLAALLGDPRYERSVKERVKELVKRDPRVEELVRELIKRLREAGNPRAARILEEALR

SEQ ID NO: 1096 - protein, 65 aa, synthetic construct
  REGION 1..65: note = Synthetic
SLEEEIERALKRAGVPPQLIRIIKKLIRELEKRGVPPERIKRLVFTFLLQYDRRLALRVFFLLRK

SEQ ID NO: 1097 - protein, 65 aa, synthetic construct
  REGION 1..65: note = Synthetic
SEDETFKKLVKKIAKEANVPSVRVTKVRGNFLVEIKGRDKAALRAALLIRRVAERLGLKVRIIMR

SEQ ID NO: 1098 - protein, 65 aa, synthetic construct
  REGION 1..65: note = Synthetic
DELREILEKALKTGDPRLLKLVLELLMRLALKGDPKARRLLAFLQVLRRRHDPEEVVKILLRLLK

SEQ ID NO: 1099 - protein, 65 aa, synthetic construct
  REGION 1..65: note = Synthetic
SVLEELLRLARELGDKRLADIIRALIRAVRNGKISPEKALRLILAYAHFLGNKELFRVVLRLFKK

SEQ ID NO: 1100 - protein, 55 aa, synthetic construct
  REGION 1..55: note = Synthetic
DKLTKAAKELAKKVKSGKLSPKQAMRLLFVIAFRLGIDRKEMVRAAQHLMLLITK

SEQ ID NO: 1101 - protein, 65 aa, synthetic construct
  REGION 1..65: note = Synthetic
SEKEYLERVLRLLEQGNRRRAIARLLQILQELKRRGDPRVEEFRKLVRLLARDEEKAKELVRRLR

SEQ ID NO: 1102 - protein, 65 aa, synthetic construct
  REGION 1..65: note = Synthetic
TEEEKLKTKIKELAKKVGVPRVKVRVRDGRVLVLVIGDDENAQTFSKLLLRIALREGIPLFVFIQ

SEQ ID NO: 1103 - protein, 61 aa, synthetic construct
  REGION 1..61: note = Synthetic
DNKVFMRAYFIVQDIQKKYPDPREAKKVAKEVLKRIVDSIDDPDERFVVHAAARLLLRKIG

SEQ ID NO: 1104 - protein, 65 aa, synthetic construct
  REGION 1..65: note = Synthetic
SLEEALEIIEKELGNPKLVQALRQLIRLLKRRGFSPELILAALRLFLRRINTPEARLAYKILRET

SEQ ID NO: 1105 - protein, 60 aa, synthetic construct
  REGION 1..60: note = Synthetic
SEESKRAKELIEAAARRLGLDPSAVEKARKLFDKLVKRGISPDEAFHIAIRFLMKLSTSK

SEQ ID NO: 1106 - protein, 65 aa, synthetic construct
  REGION 1..65: note = Synthetic
DARLRLIFWARFAARSAGARRVRVTEHNGTVRVEVDGNNERVQQLLKSVKRLAEKLGVPLEVTTR

SEQ ID NO: 1107 - protein, 63 aa, synthetic construct
  REGION 1..63: note = Synthetic
IEEAKLLKRMVKAAAKRLSQGRLDEEKWRLIVIMASSRLFSLGISREEIRDFQRQAKELKKKA

SEQ ID NO: 1108 - protein, 64 aa, synthetic construct
  REGION 1..64: note = Synthetic
DERTKKKAEELFKRLIKILQNAPNPFLRQLAKELETKFRRAKKNNDDDTLIKLVFFAIMVVRAG

SEQ ID NO: 1109 - protein, 62 aa, synthetic construct
  REGION 1..62: note = Synthetic
DERVRRIFKVLRELARISRNLSEEESERFFKKILEEAARRNDRILYLAAKLALRDSRRALHF

SEQ ID NO: 1110 - protein, 61 aa, synthetic construct
  REGION 1..61: note = Synthetic
SELDKIVKKLTDIAREAYKHNDKETIEKALRWAALFARQYRDPKFRELFRIIFQLRQRVER

SEQ ID NO: 1111 - protein, 65 aa, synthetic construct
  REGION 1..65: note = Synthetic
DERKKVARAVWEIAKRAGVKGFFVFVKEGKVWVTLRGTDESAQTAKKLIEEWSRKNNLDVTVRVR

SEQ ID NO: 1112 - protein, 65 aa, synthetic construct
  REGION 1..65: note = Synthetic
DEKRRIFMRILLAARRVGVRRVLVFERNGRFKVFIQGNDERAKTASKLVTKLARKLGLDVKVTVV

SEQ ID NO: 1113 - protein, 65 aa, synthetic construct
  REGION 1..65: note = Synthetic
SVDELVEEAIRRGLPPEELEKLLEELLKKTGDPRVRYVIVALRILLRLGAPPQIVLWVVLRIARR

SEQ ID NO: 1114 - protein, 65 aa, synthetic construct
  REGION 1..65: note = Synthetic
DERREELVKRLKKSPDPSEKAIAAAYEYFLKMGLDPEMVLYQLKRFARKVGDPKLEELVKRLEET

SEQ ID NO: 1115 - protein, 65 aa, synthetic construct
  REGION 1..65: note = Synthetic
SRLLRFALLVRRLAEDANVPHVRVVVSNGRVRVLVRGNDESAQKFIKLFKTVATKLGIDVRVHVV

SEQ ID NO: 1116 - protein, 65 aa, synthetic construct
  REGION 1..65: note = Synthetic
THREILKLILKIAKKDEELAKRIYLIVWALRRGAIDPTQVERLLEKLIREFGDPLVRLVLELVRK

SEQ ID NO: 1117 - protein, 65 aa, synthetic construct
  REGION 1..65: note = Synthetic
SLELVEEFLKKLNTPEARILLRALEFLKRRGWPPRLVVQILYTLARKLGNPELAEEIRRLAREAP

SEQ ID NO: 1118 - protein, 65 aa, synthetic construct
  REGION 1..65: note = Synthetic
GPEVLKKFEELRKRDPREALLFVLRIVFELGDPRLKRLAVRAWFLLKDGNPLVEQVIRRLRELLH

SEQ ID NO: 1119 - protein, 65 aa, synthetic construct
  REGION 1..65: note = Synthetic
SEEEKITKTIETLARRAGLDDVKVNVKNGKVIVQIRGHDRAARRLAFLVIRWADEQGLKVLVQIT

SEQ ID NO: 1120 - protein, 65 aa, synthetic construct
  REGION 1..65: note = Synthetic
SEDEKIRKTVEQIAREAGVESVRVNRINGKLHVTLKGDNRAARRVAALVIRYADEVGIRVDILLL

SEQ ID NO: 1121 - protein, 65 aa, synthetic construct
  REGION 1..65: note = Synthetic
SSRRRVISRALQLAQKAGVKRITITEKNDRLRVTLNGNSPSIQKARRLIEKLAKEAGVEVEVRTR

SEQ ID NO: 1122 - protein, 65 aa, synthetic construct
  REGION 1..65: note = Synthetic
SEEEKVAKVIETIAKEAGVPSVRVVRVRGKIVVIIRGTDEKARRALRLIFQFANKQNLPIYIRLR

SEQ ID NO: 1123 - protein, 64 aa, synthetic construct
  REGION 1..64: note = Synthetic
DRSEVRKVFTLAFRVARLLASEDPNNRKRAKKEASTIKKELSKKSPSLSSLFEFLVRRITSRLG

SEQ ID NO: 1124 - protein, 65 aa, synthetic construct
  REGION 1..65: note = Synthetic
DPVEEKFKRLEKELRKSIKKGKISPEQALRILIKFMMHLFVRGKLSRNVAEMAVKFMREVDERKR

SEQ ID NO: 1125 - protein, 55 aa, synthetic construct
  REGION 1..55: note = Synthetic
DVEKLVKEVQKLAKKRGDNRAHVLAFVILLMYRRGLISSEIASRVLESVAKRLKG

SEQ ID NO: 1126 - protein, 65 aa, synthetic construct
  REGION 1..65: note = Synthetic
SEERKTLARLLLIAKRAGVPRFIVLHVNGRLQIIFKGDSPSVQRARKLAEEFSKKSGIPLKVRVK

SEQ ID NO: 1127 - protein, 65 aa, synthetic construct
  REGION 1..65: note = Synthetic
DLDETVKKIAEDVAKEAGVPSFRVRVSNGKLTVRFKGNNESARRAFMRIRLLLRRLGVPVIVQVV

SEQ ID NO: 1128 - protein, 61 aa, synthetic construct
  REGION 1..61: note = Synthetic
SRVKRLSVRIVMLLLFARKAGLIDPEEVRRLYEEVNRLARKGDWKQLQKLFRKILEEIRRR

SEQ ID NO: 1129 - protein, 65 aa, synthetic construct
  REGION 1..65: note = Synthetic
SLLEELLELLKRYVSPELVERVERLLRALLRHGFSPQLVILSVIRLLEARGDPELARLLREILRR

SEQ ID NO: 1130 - protein, 65 aa, synthetic construct
  REGION 1..65: note = Synthetic
DQDRRILEIIHQIAEEANVPSFTSYVSDGIVFVRVWGNDEAAKTALTRIKKTAEKLGVQVRVRTL

SEQ ID NO: 1131 - protein, 61 aa, synthetic construct
  REGION 1..61: note = Synthetic
PELRRLTARLLFLVVQAIRRNDEDTVRTLLKIAKELADRNPKYKFVFLVLRSMIFRMRRRI

SEQ ID NO: 1132 - protein, 65 aa, synthetic construct
  REGION 1..65: note = Synthetic
DKSETFSKLAKEIAKKVGVPSVKVYNIRGRLLVTFRGQDRAARRAALLVRRLADKLGVEVRVLIQ

SEQ ID NO: 1133 - protein, 65 aa, synthetic construct
  REGION 1..65: note = Synthetic
SRHRLVSQLIRKAARRAGVPHVDVRVKDGTVSVTIDGTDVAARAVFAFVKYVSKLLNVRVSVTFK

SEQ ID NO: 1134 - protein, 65 aa, synthetic construct
  REGION 1..65: note = Synthetic
DEELIERALELIERGDPSVRKVVAELALLLARKGDRRRLSYVARVLRLLKRDPRAAKQALKILLS

SEQ ID NO: 1135 - protein, 65 aa, synthetic construct
  REGION 1..65: note = Synthetic
SRLLALSIFIWNIARAAGVPSVTVRVKNGKITVTVSGNTESAKLARRAVEAFARRYNVDVDFQIR

SEQ ID NO: 1136 - protein, 65 aa, synthetic construct
  REGION 1..65: note = Synthetic
SELLRFRLRLRRVADRANVRRVTVFRLNGKIFVLIKGNDDSAKIVEKFVRTVAKKRGIPVVVKLF

SEQ ID NO: 1137 - protein, 62 aa, synthetic construct
  REGION 1..62: note = Synthetic
DEKEKTVRSVIKRLQELSKKASDLRKRMRLIMLSKILTEALKEDKDEAHKLAQRVKEMLDKD

SEQ ID NO: 1138 - protein, 65 aa, synthetic construct
  REGION 1..65: note = Synthetic
SELKEVVERVLKGELSPSEVLRVLAELYRKTGDPRYRNLLARLYLARRRGDPELLKRILELIRRA

SEQ ID NO: 1139 - protein, 51 aa, synthetic construct
  REGION 1..51: note = Synthetic
SRERIARLMMIAFEKGDRRALVVVAQAWFALRRGDEKTAKRLIKLASKLLS

SEQ ID NO: 1140 - protein, 65 aa, synthetic construct
  REGION 1..65: note = Synthetic
DKETAFAALLRAMAKRAGVPSVRVEVSNGKVTVSVKGTDDAAELFRLLVMFLAKRLGIDVDVQIR

SEQ ID NO: 1141 - protein, 60 aa, synthetic construct
  REGION 1..60: note = Synthetic
DDRDKLARLVIKAMELADQIKDERWSLHVKTLIAHAWFRNDTKLAEEVLRLAKKLVESVQ

SEQ ID NO: 1142 - protein, 65 aa, synthetic construct
  REGION 1..65: note = Synthetic
SERKTLYQLVARLAQELGVPRVLVRLSEGEFLVFVFGRDESAQTLSKILTTWAKKVGLKVEVILR

SEQ ID NO: 1143 - protein, 65 aa, synthetic construct
  REGION 1..65: note = Synthetic
DEEVSRAYRLAAKLGDPRLAALIRLLLKLVKRGDPNLRLVVAVARRLAKELGDPEILEVLEKLLK

SEQ ID NO: 1144 - protein, 65 aa, synthetic construct
  REGION 1..65: note = Synthetic
SSEEALKLIKELAPPEVRIAIEALHRHLKRQGLPPRLIVQIIIKFLERRGVLPPEVAKEARELLR

SEQ ID NO: 1145 - protein, 62 aa, synthetic construct
  REGION 1..62: note = Synthetic
DRDEEFQKKVESAYRRLKERNASDKRILSYIARLLREAQKIGATKARKLAAEIALRLARRLD

SEQ ID NO: 1146 - protein, 63 aa, synthetic construct
  REGION 1..63: note = Synthetic
HEEIAKKLKKKVRTILDQLNASDEQKVRAFFLLHFAERVLSRISDKRHAKRFADFVTQMISNM

SEQ ID NO: 1147 - protein, 65 aa, synthetic construct
  REGION 1..65: note = Synthetic
SEELEEVLELLKRDPKKAFRLLAELAREAQRRGDPELFKVLMLLLIYIRLGNLKLARQLLEVLLK

SEQ ID NO: 1148 - protein, 60 aa, synthetic construct
  REGION 1..60: note = Synthetic
DKRQVLRVFEKAFHHMRHHPQVKKLAIKVMMLAVQAKKQNNPELLKQAEELLKEVEKRAK

SEQ ID NO: 1149 - protein, 65 aa, synthetic construct
  REGION 1..65: note = Synthetic
SAEEVLELIKELLPPDVRRFVERFIRKLREDGVPPEKIVELIRAALKYYGRLTPEIERLVRELRK

SEQ ID NO: 1150 - protein, 55 aa, synthetic construct
  REGION 1..55: note = Synthetic
DVVKLVIEVQKLAKKRGDLRAHILASRIIFAFMKGLMSSEEASKLLKTLAKRLKG

SEQ ID NO: 1151 - protein, 65 aa, synthetic construct
  REGION 1..65: note = Synthetic
SELEELLERIKRTGDPKLIARVARLLFELAEEKNDPKLRRLAALVYFYLRTGNPKAAKQILKRIE

SEQ ID NO: 1152 - protein, 65 aa, synthetic construct
  REGION 1..65: note = Synthetic
DERRRFIARLLQVAQEANVRRVLVMYHNGSIRVFINGNDDSAKIVEKFVRTVAKKRGIPVSVTTR

SEQ ID NO: 1153 - protein, 65 aa, synthetic construct
  REGION 1..65: note = Synthetic
TEARRLARLIAEYARKAGVPHVVVVVLNNHVFVRFDGNTDSVKKASEFAKEVARQLGIRLRVVTR

SEQ ID NO: 1154 - protein, 64 aa, synthetic construct
  REGION 1..64: note = Synthetic
SPETLKLALFIALVRRLFKNGEIDPSQAKTLLKRLQEKAKKIGDHFAVRLAEHAIRAIKKAEKS

SEQ ID NO: 1155 - protein, 58 aa, synthetic construct
  REGION 1..58: note = Synthetic
SDELSKKLEKKVKDALKKGDKRLAKFLVIKAILEAKRLNDRKLEHVAARLALLIFKWS

SEQ ID NO: 1156 - protein, 63 aa, synthetic construct
  REGION 1..63: note = Synthetic
DLDEEVKKTLKKLYEIAKKDPSKKDEVEKLLVKVAAHAHFRIQNPEKRRKALELALTLMRRIG

SEQ ID NO: 1157 - protein, 55 aa, synthetic construct
  REGION 1..55: note = Synthetic
SFEEVIRRAIKLAEKNGDKHALVLLKVILFLARQGKMSEELAERVARTIEKRLKS

SEQ ID NO: 1158 - protein, 63 aa, synthetic construct
  REGION 1..63: note = Synthetic
DKEEAERILSKIHELARRKNDRKVQRLVMRLYFALQFADKKNNKKMVDDITRLAKELLKKVES

SEQ ID NO: 1159 - protein, 65 aa, synthetic construct
  REGION 1..65: note = Synthetic
TKEKLREIVRLLREGDPRARELLRRLLKELAERGDRRLFFLVFAILRLLKRNPEEATKLLAALAR

SEQ ID NO: 1160 - protein, 62 aa, synthetic construct
  REGION 1..62: note = Synthetic
SDESRKLQRRLALIFAALRQGFISNDEAKELAKRVEEKARKLGDKHVRQLVKFVKDAIERAG

SEQ ID NO: 1161 - protein, 65 aa, synthetic construct
  REGION 1..65: note = Synthetic
SLEELEEILRRLARKTPAAAILLRILERLRKRGIPPRLVLRALLLFAKHLGDPELEKLIERVLRK

SEQ ID NO: 1162 - protein, 65 aa, synthetic construct
  REGION 1..65: note = Synthetic
TRELLLRVLILLWQLRTPIARAIIAFIYIAKKEGVSPEEILKIILKLARRAGDEEVVRIIEELSP

SEQ ID NO: 1163 - protein, 65 aa, synthetic construct
  REGION 1..65: note = Synthetic
SLLEELEELLKKLNTPAARMLIALLRRLLEEGRNSPKLILLFLWLLARRLRDPEVVKVIREILRK

SEQ ID NO: 1164 - protein, 64 aa, synthetic construct
  REGION 1..64: note = Synthetic
PVYVFISNVTPEAEKIVKKIARLGRVLVIKRPGNRIFVYVQNPELAKQLVELVRKAGARVLIFR

SEQ ID NO: 1165 - protein, 65 aa, synthetic construct
  REGION 1..65: note = Synthetic
SELEELIERALKTKDPELLKKALLLAARLLDETGDPKLRIVVAYLWFAKARNNPKLIKRALKAAR

SEQ ID NO: 1166 - protein, 65 aa, synthetic construct
  REGION 1..65: note = Synthetic
SERRTVRRLLMEAALRLGVPFVFIRTVDGRVYVFVRGKDESAQTLSKLAEELAKKLGVKLHVRRR

SEQ ID NO: 1167 - protein, 63 aa, synthetic construct
  REGION 1..63: note = Synthetic
PLEKLARHVVTKAKEIVKKAQDPRLSKIFKEIADKLETALKNNDEKTVRYLIAKFFFLKRRLS

SEQ ID NO: 1168 - protein, 64 aa, synthetic construct
  REGION 1..64: note = Synthetic
SSEDMRKVFIMVLILAHEAAKDEDLERKARKKLDKILKDLKVPNAHFFKQMFDLLVKKVRSKLS

SEQ ID NO: 1169 - protein, 65 aa, synthetic construct
  REGION 1..65: note = Synthetic
DREEKITTLVKEAAKRAGVPHVDVNFSNGRIHVRVRGNDRASRRLFAFARNLALAYGVQLQVLNR

SEQ ID NO: 1170 - protein, 64 aa, synthetic construct
  REGION 1..64: note = Synthetic
DPTRHKLMLNIFLVLVLFKKGKIDPSQAKTLLKRLQEKAKKIGDHDAVHVAELAIVRIKQAEKS

SEQ ID NO: 1171 - protein, 64 aa, synthetic construct
  REGION 1..64: note = Synthetic
NRDRIRAELLLWAIARRLERNNLDPRLVRTAIQVVARRLQREIQNPENRKFVQTVAEELIKRVM

SEQ ID NO: 1172 - protein, 61 aa, synthetic construct
  REGION 1..61: note = Synthetic
DRRERQLKLLIDFLVTRIKKYNPELAKKVESIVKKAEDNQDPNLLVKALLVAIKALKTVSS

SEQ ID NO: 1173 - protein, 61 aa, synthetic construct
  REGION 1..61: note = Synthetic
DPKKLDELRKKIETLLRKVTDPTAYRLVMRALFLAIMALKQQNPLLEQLARELYEKAKKIQ

SEQ ID NO: 1174 - protein, 60 aa, synthetic construct
  REGION 1..60: note = Synthetic
PTEEVIRTVMLLVFMARRSQDPTRVEKLLTKAEKLAKNINDPRLEELVKIAKKQARSILS

SEQ ID NO: 1175 - protein, 61 aa, synthetic construct
  REGION 1..61: note = Synthetic
DLKVLSRALLIVLKIQKKYPDPREAKKVAKEVLKRIVDSIDDPKERVRVFFFAHMLLRMIG

SEQ ID NO: 1176 - protein, 65 aa, synthetic construct
  REGION 1..65: note = Synthetic
SELAELLEEALRRNDPELLRRIVRLLARLAEKREDPRLWRLAALLWFALRTGNPLLIKAVIKKLK

SEQ ID NO: 1177 - protein, 65 aa, synthetic construct
  REGION 1..65: note = Synthetic
PEELRKLLELIERGDKKKVFELVRKIAEKLKKKNPSLVRLLVAYVFLALRGSPAARRLLRSLAEK

SEQ ID NO: 1178 - protein, 63 aa, synthetic construct
  REGION 1..63: note = Synthetic
SEEIFRKLMFAMFIAKRTGDPRFKKIAEKLNRILETIAKRDQDPDAKRLLRIFRQAAKRRKKS

SEQ ID NO: 1179 - protein, 61 aa, synthetic construct
  REGION 1..61: note = Synthetic
DLNARIFLLILRAARKNDEKLARELLDKSKKDPQVESAVERLRWFDPRVDKAYKILEKVVS

SEQ ID NO: 1180 - protein, 64 aa, synthetic construct
  REGION 1..64: note = Synthetic
DKKLREELLRVALEAMKKIKDPDTQKSILKIAAQAFFRARNIDDPTERDKVLKKWLKLLKDFIS

SEQ ID NO: 1181 - protein, 64 aa, synthetic construct
  REGION 1..64: note = Synthetic
DEKAEKLILKVKMFILMIKLAQSKEMKSKASEAAKRLLTEISKIPDEKAQKIVKKLKEILDKLS

SEQ ID NO: 1182 - protein, 65 aa, synthetic construct
  REGION 1..65: note = Synthetic
SQLEELIERALKTKDPKLLRHAIIVAFLLLRRTGDPKLREVLHLLAEAFFKKDPELIERALRVAR

SEQ ID NO: 1183 - protein, 65 aa, synthetic construct
  REGION 1..65: note = Synthetic
RYTEHVFFVWEATDEEARKRIRKRVEQIEREAKEEAKKRGREPQTYFVERTRDGYVSAVLIIIVE

SEQ ID NO: 1184 - protein, 64 aa, synthetic construct
  REGION 1..64: note = Synthetic
DDRRTELLSRLVKKLLEQARQISDPRQARKISLKLHMVKNLAQNPKVRTLADRAIKQVNSIVRS

SEQ ID NO: 1185 - protein, 65 aa, synthetic construct
  REGION 1..65: note = Synthetic
SKLEEVERLLRELAKKDPYAYILLRLLKKLKELGVPPERILRLLVAAAKRVGNPELAKLIEEILR

SEQ ID NO: 1186 - protein, 65 aa, synthetic construct
  REGION 1..65: note = Synthetic
SVLFEVAMVALELGDPRLEILVIRAILLLKRGDPRVKEVLKKLVELLRKLGNPELAKKVEELLKK

SEQ ID NO: 1187 - protein, 61 aa, synthetic construct
  REGION 1..61: note = Synthetic
SKHEKARKALAMLLQIAVELGVDRRYMVRAMFIFLELVKNGVDLDQARRIAEKWLKKVVKS

SEQ ID NO: 1188 - protein, 65 aa, synthetic construct
  REGION 1..65: note = Synthetic
NRADQLIYFVRKIAKRLGAPDVKVDVRNGRVTVTIKGTDFRARAVAAAARIVARLLNLELDVQIR

SEQ ID NO: 1189 - protein, 65 aa, synthetic construct
  REGION 1..65: note = Synthetic
SYVERVVELLKRLGDPVARELAELIEEILKRNYMLAMFAAQMAEEALKLNDPDMLDQLIRFLKHH

SEQ ID NO: 1190 - protein, 65 aa, synthetic construct
  REGION 1..65: note = Synthetic
SAAARVALLVRRVAEKLNVPNLRVFVLNGKVQVLIRGDDESARTAYKIVKKISDTLGAPVRVQIH

SEQ ID NO: 1191 - protein, 60 aa, synthetic construct
  REGION 1..60: note = Synthetic
DKFAIVMHLLFLAKRASKRNDKLLVLFVLRLAKRLYDKHPDDEKIEKVLKIVEKIYRKVF

SEQ ID NO: 1192 - protein, 65 aa, synthetic construct
  REGION 1..65: note = Synthetic
DIEEVLERLKELIRRGDPRVRRLLARVAMRLRQRGDPRARRFFLAFFRFAAGNPEHALSVIRKLP

SEQ ID NO: 1193 - protein, 65 aa, synthetic construct
  REGION 1..65: note = Synthetic
SELEEEFEEALERGTVEEFLRRLYRELAREGDPRSAALVLAAFRLVKEGDPEAAKLALRIIERRR

SEQ ID NO: 1194 - protein, 64 aa, synthetic construct
  REGION 1..64: note = Synthetic
DPTRRHLMSAIFMVLFLFKKGKIDPSQAKTLLKRLQEKAKKIGDREAVFLAELAIRIIKKAEKS

SEQ ID NO: 1195 - protein, 62 aa, synthetic construct
  REGION 1..62: note = Synthetic
DDRLRRELFLVVVRVARRLGLDRHAILVAALLAARLADKGVDPTQAERILEKVLRTIKKRKS

SEQ ID NO: 1196 - protein, 65 aa, synthetic construct
  REGION 1..65: note = Synthetic
DEEDKVRTTVTEIAKKAGVKGFHVTVRDGKVRVVLKGTDESARRAFRLIFQARHKNNLKVFVLRF

SEQ ID NO: 1197 - protein, 62 aa, synthetic construct
  REGION 1..62: note = Synthetic
MEKYHRLLTKLSRLVIRAQQIPDKDKARSLVKTVAEEAIKSIDDPTLRIRFFFFVRFILENM

SEQ ID NO: 1198 - protein, 65 aa, synthetic construct
  REGION 1..65: note = Synthetic
TLKEVAQLLQEILQHVPDPRVRRLILIVYLALRKGNPELAERALEEVIKRLGDPRLREALKLIRR

SEQ ID NO: 1199 - protein, 63 aa, synthetic construct
  REGION 1..63: note = Synthetic
DKDEVLELAQRILKEVQERGNEEYSRRILALVAAAFTASRKNDEDFLKFILKVIRELYKKLQS

SEQ ID NO: 1200 - protein, 65 aa, synthetic construct
  REGION 1..65: note = Synthetic
NLSKHVAAAARIIARFVGVPSWSIDVKNGTVTVSLKGRDSRAQQAAYMIERFAKRLGVPVDVQVR

SEQ ID NO: 1201 - protein, 65 aa, synthetic construct
  REGION 1..65: note = Synthetic
SNSEELAKLIRQVAREANVPSFSVDVRNGTVHVTLKGDDESFRRVFVIALQLAADLRVKVRVTVR

SEQ ID NO: 1202 - protein, 65 aa, synthetic construct
  REGION 1..65: note = Synthetic
GPEEVIEIIAKALGVPPEKVRRAVELMRKRLRIPPERALWLLLNLVKRLDPRFKEEVEEARRLLQ

SEQ ID NO: 1203 - protein, 65 aa, synthetic construct
  REGION 1..65: note = Synthetic
GEEEALKILAEVLGQSPEKIRAAVRHIRRRFNVSPEEAILLLAKLIARHLNDPRVAEEIRKALEK

SEQ ID NO: 1204 - protein, 65 aa, synthetic construct
  REGION 1..65: note = Synthetic
SDRKIAARAIRIVARRAGVPSVEVTTTNNTIRVTLQGRDEAVRLAAIFIWNISRRLNVPVEIRIR

SEQ ID NO: 1205 - protein, 55 aa, synthetic construct
  REGION 1..55: note = Synthetic
DELQKIATRLIKLAEKKGDKRLAMIARAVKFMIKRGELSKEEATRLLRQIEERAS

SEQ ID NO: 1206 - protein, 65 aa, synthetic construct
  REGION 1..65: note = Synthetic
SEFREVIRLLEELGNPRVARFVRLAWWLLRLGNPENAKAALKAALRLAERLGDEEAKRLIEKLLK

SEQ ID NO: 1207 - protein, 65 aa, synthetic construct
  REGION 1..65: note = Synthetic
SARKKITRILLELADRGDPLRKHVVRVWFILRKDLDKAEKLVRQLIERFGDPLLREILELIKELK

SEQ ID NO: 1208 - protein, 65 aa, synthetic construct
  REGION 1..65: note = Synthetic
SSREELKKLVEKIAKKVGVPSVTVVERNGKILIVLKGHDEAARRAALLIRRVAEKLGVPVRVVIR

SEQ ID NO: 1209 - protein, 61 aa, synthetic construct
  REGION 1..61: note = Synthetic
DWRHAALLLAVIARIAKQDNDEDLLKRARTLFELLHRAAQRGDEDTVKRVIEEAKKLAKDL

SEQ ID NO: 1210 - protein, 63 aa, synthetic construct
  REGION 1..63: note = Synthetic
PLESMARFVVKRAKEIVKKAQDPRLSKIFKEIADKLETALKNNDERKVRILIAFFFVLRQHLS

SEQ ID NO: 1211 - protein, 64 aa, synthetic construct
  REGION 1..64: note = Synthetic
DDRTARLLSKVVKSLLEQARQIEDPQQARRIQVKLFMVKRFAQDPRVKTLADRAIKQVKSIIKS

SEQ ID NO: 1212 - protein, 64 aa, synthetic construct
  REGION 1..64: note = Synthetic
DQEELEDMIKAVEKFAEHLERNPDPKKKKAAKIVKDAVKNAKQIPNPRKAKKYLMIVVFRLRKS

SEQ ID NO: 1213 - protein, 55 aa, synthetic construct
  REGION 1..55: note = Synthetic
NVEELAKKVQKLAKKKGDRRAFLIAFVLVRALRKGILSEEFAKRVLEFMEKRLLK

SEQ ID NO: 1214 - protein, 53 aa, synthetic construct
  REGION 1..53: note = Synthetic
SEETVRKAFQVATRRGDQKAARTLMRILFMLRMGVLDEEEQKKADKYAKSVIS

SEQ ID NO: 1215 - protein, 62 aa, synthetic construct
  REGION 1..62: note = Synthetic
DEFRRKAARLALRHLEILRNLSEEEAKKWARKILQEAAKKQDSALWIAARAALDFWRRALKD

SEQ ID NO: 1216 - protein, 64 aa, synthetic construct
  REGION 1..64: note = Synthetic
SERLELIVRTLAHLIRFADERLRKLIFKFLLQLHEDELRKSSHFLKRASDEEIKKTAEEIIRRA

SEQ ID NO: 1217 - protein, 65 aa, synthetic construct
  REGION 1..65: note = Synthetic
PIEELIKELSKRVPPRLRQYLEAALRLKKRNPETARRLLAIVIYEILRLDPNDEIARKVLRLLMR

SEQ ID NO: 1218 - protein, 53 aa, synthetic construct
  REGION 1..53: note = Synthetic
SETSKKVREFLELVIQRGDERKFMMMIRFAKKRGLLSDEELDRWRKRFEKVKK

SEQ ID NO: 1219 - protein, 65 aa, synthetic construct
  REGION 1..65: note = Synthetic
SIEEVVEKVLKEAREKGDQRVVLLAEALKRALERGDKRRALALLIILRRLVGDPELRKAATLLVR

SEQ ID NO: 1220 - protein, 64 aa, synthetic construct
  REGION 1..64: note = Synthetic
LERDILTAFIIADELKQEFKDDPHIKSLVHRALIELMRAWRENDEDKIKEVIKKIKTIKKKADS

SEQ ID NO: 1221 - protein, 65 aa, synthetic construct
  REGION 1..65: note = Synthetic
SLLERIEEALRRNDPRLVLLLLAELLHLTGDPRVRFVLVYFYFALKEGDPEKAKELVKELLKRVK

SEQ ID NO: 1222 - protein, 61 aa, synthetic construct
  REGION 1..61: note = Synthetic
DQMERLRKLAAHIVMLAQKVGLSPEIIHRIARKAFQVFQDRDEDEARKWVEEVINRWKKKL

SEQ ID NO: 1223 - protein, 65 aa, synthetic construct
  REGION 1..65: note = Synthetic
TKEALRLILRLLDKRPDDSLLRRIMAYIFIAKRLGNPEFVERIVRQLLKRTGDPRLKEVLELLKK

SEQ ID NO: 1224 - protein, 65 aa, synthetic construct
  REGION 1..65: note = Synthetic
SEELVERAVKFAGLSPHVEKILRAVVRVLERLGASPQQIKYILTRFLRRLIPDPEKLRRAEEILR

SEQ ID NO: 1225 - protein, 63 aa, synthetic construct
  REGION 1..63: note = Synthetic
DEELKKLLKIVVRLLIEADENNDEKSARLARRAYLLLWLAKRADEEHQRQLKTLVKQLIKKIK

SEQ ID NO: 1226 - protein, 65 aa, synthetic construct
  REGION 1..65: note = Synthetic
SLELVEEFLKKARTPRAFLLLRLLERAKKQGLPPEKVVELLRAAAKALGNPELAEEIRRLFEEAP

SEQ ID NO: 1227 - protein, 65 aa, synthetic construct
  REGION 1..65: note = Synthetic
DIEEALELARRLGAPPRVVDYVEKLARRLKEKGLPPRVVLALALYIARLLGDPLLEEAIKRLLKK

SEQ ID NO: 1228 - protein, 65 aa, synthetic construct
  REGION 1..65: note = Synthetic
TEIKKIAAAVFRALREGTLEEFLRELLELYRKKGDPRILHRLLIAISIARTLSPEAREIVKRVRK

SEQ ID NO: 1229 - protein, 61 aa, synthetic construct
  REGION 1..61: note = Synthetic
DDRVKKARKIASTILRRLGVDEAEIRAAEAIVERLVKKGVDPKDAARVAVLAVRFLLRIRR

SEQ ID NO: 1230 - protein, 65 aa, synthetic construct
  REGION 1..65: note = Synthetic
DAIRRIAELAHRYGDPLLKLVVAAVWLLKRDPNDRAARHLLRALEQAAKKKGDPVLEEAIRLAKK

SEQ ID NO: 1231 - protein, 64 aa, synthetic construct
  REGION 1..64: note = Synthetic
PEIMVMMVEKLITLLKKLAQNPEMRKDIERLEKEIRTRIKKDPRFARKAFMILLQLYHFLKQQM

SEQ ID NO: 1232 - protein, 65 aa, synthetic construct
  REGION 1..65: note = Synthetic
PHREVLRLLAELLERARDPRQRSLLRLILFALHLRNEEMLKQLLEALERVLGDPELVRKLEELIK

SEQ ID NO: 1233 - protein, 61 aa, synthetic construct
  REGION 1..61: note = Synthetic
PEARQITLRLSLEVARAIDRNDEDTVRTLLKIAKELARRNPQYREVFILLYNFIHRAKRAL

SEQ ID NO: 1234 - protein, 65 aa, synthetic construct
  REGION 1..65: note = Synthetic
DVEELLEELERLGLLDPELLELLKELIRRLKEEGDPEKLRKLHLLIAMARKDPLARFLLHFLVRK

SEQ ID NO: 1235 - protein, 64 aa, synthetic construct
  REGION 1..64: note = Synthetic
DEARSLALEVAIRAILKARQLNRPYDVTFTVGGQKYTIRVDTDPSKQRRALRRILLIFMRYAFK

SEQ ID NO: 1236 - protein, 64 aa, synthetic construct
  REGION 1..64: note = Synthetic
DKTEIIREMLTELAKKIKSVSDPTQKEKLKRHLFLLVFILKNAPDPTEREAAKYAETLIKRILS

SEQ ID NO: 1237 - protein, 63 aa, synthetic construct
  REGION 1..63: note = Synthetic
DPRHEALRRVFSRLYLLLYRLTNPEEKKKAQKWAEKVLQEAGVDPQIARAAVEIVTREADRAR

SEQ ID NO: 1238 - protein, 63 aa, synthetic construct
  REGION 1..63: note = Synthetic
DEELKTLRSIVETLLEKARRNNDERSRRLARLALFLLLRARRADEEERKVLKRAVKALIKAIK

SEQ ID NO: 1239 - protein, 58 aa, synthetic construct
  REGION 1..58: note = Synthetic
SDELSKKLEKKVKDALKKGDKKRAHLLVVHALLEAKRLNDRKLFKVAAKLFMLIQKWS

SEQ ID NO: 1240 - protein, 65 aa, synthetic construct
  REGION 1..65: note = Synthetic
SEAEEISRLLRLAAKALGVPSVEFDVDNGTVTVTVHGDDDAAQILWSLVRRVSREEGVPVRFEFK

SEQ ID NO: 1241 - protein, 64 aa, synthetic construct
  REGION 1..64: note = Synthetic
DETSKAVRMLAKVILLLKRNPNNEEAKKLYKEAVTIAQKVIKKLKDPKKQRHLHFLIHLATLFS

SEQ ID NO: 1242 - protein, 65 aa, synthetic construct
  REGION 1..65: note = Synthetic
DEVERVLEILKRLGVDPRLLQAARQLFRLLRKKGLDPEQVRLLVAVFLRRRDEDASRLFRKLLRK

SEQ ID NO: 1243 - protein, 65 aa, synthetic construct
  REGION 1..65: note = Synthetic
SERLFFSLRLRGDNRTSRELAEAWARRLAERAREEARRRGLEIRVHFRFTRENGKLTVTLRLHIR

SEQ ID NO: 1244 - protein, 55 aa, synthetic construct
  REGION 1..55: note = Synthetic
DVEKKAKEAIKLARKKGDKRAVLILHAIAVMYRRGLIDKNDADKLIEFIIRRLRS

SEQ ID NO: 1245 - protein, 65 aa, synthetic construct
  REGION 1..65: note = Synthetic
SAVEKAVKIIKKLAKDLNIPRVQVRYRDGRILVLIHATSPEAKTLRKLILEVARRLGVSVFVYLQ

SEQ ID NO: 1246 - protein, 65 aa, synthetic construct
  REGION 1..65: note = Synthetic
SLEELERLIRKLVKEGDPAARYALRVLRLLKKQGIPPDFIVAILLKFLRRLGNPELIRLAEKLKN

SEQ ID NO: 1247 - protein, 55 aa, synthetic construct
  REGION 1..55: note = Synthetic
NYMRVIMRAVELALKKGDKKAVRILFHIAMAARIGTLDPTKAERLARRIEKKLRS

SEQ ID NO: 1248 - protein, 65 aa, synthetic construct
  REGION 1..65: note = Synthetic
SLEEEVERLLREAGVPPKIIRLLKAIIRLLLKRGIPPVAILRILIKFLEKLGDPRAAKLLEELLK

SEQ ID NO: 1249 - protein, 65 aa, synthetic construct
  REGION 1..65: note = Synthetic
SEDEKIKKRVKEITKLAGVPSVEVRIKDGTLTVTVKGDDRAVRAALARLLNLALLLGIPIRIHVR

SEQ ID NO: 1250 - protein, 65 aa, synthetic construct
  REGION 1..65: note = Synthetic
DKEEEKILELLKQGNIEEAIKLARELARRLKDPRLAIAAAAIKHLLRRGAPPQIILYVVRRLLEP

SEQ ID NO: 1251 - protein, 65 aa, synthetic construct
  REGION 1..65: note = Synthetic
DEKEELEELVKKLGSERWFRMVVYLIARRLGVPPEEVLKRIYELVKRLKVPPKSAALHLLQELNS

SEQ ID NO: 1252 - protein, 65 aa, synthetic construct
  REGION 1..65: note = Synthetic
DAEKIIRAAVRAFARLARIPSVTVRKSNGKFHVKINGRDALAQQVAYAIKRIAKKLGLDVTVEYR

SEQ ID NO: 1253 - protein, 62 aa, synthetic construct
  REGION 1..62: note = Synthetic
SESDKLSKRIKELLKKAKEKQDKRKAMLAYLLALRVLRRYPDDEKIREVLKEAREVVRKIYK

SEQ ID NO: 1254 - protein, 60 aa, synthetic construct
  REGION 1..60: note = Synthetic
VPELERVKELVDRYAEKVGLSEEEKKKLRKLVDKLYKKGLSPMQVAIFVILFIRDLKKKL

SEQ ID NO: 1255 - protein, 65 aa, synthetic construct
  REGION 1..65: note = Synthetic
DVLEKVLKFVRKKNEQLARAVEALIRRLRERGVSPRTILILLWTILRKAGNPEAVELVEELLKRL

SEQ ID NO: 1256 - protein, 55 aa, synthetic construct
  REGION 1..55: note = Synthetic
DELKKAAKELAKLVKKGLLSPLKAIALLIDIARKLGASKEEQRRALAALLYLIRH

SEQ ID NO: 1257 - protein, 65 aa, synthetic construct
  REGION 1..65: note = Synthetic
SEVREILREAARIPDPREVKRLVLKAAKLAIKLGDPKLARLAALVYFYLRLGNPEAALHLLERIG

SEQ ID NO: 1258 - protein, 65 aa, synthetic construct
  REGION 1..65: note = Synthetic
TKLLRALAILYEKTGDPKLRSLLLVVFIELRKGRRSPEEILELIKKLLERLGNPELAEELERLFK

SEQ ID NO: 1259 - protein, 65 aa, synthetic construct
  REGION 1..65: note = Synthetic
DELEELLRELRKDPRLRAAVLLFRALLRQGYPPELVSIAVRHFLRRNGVPPELIEKLLKILRDLG

SEQ ID NO: 1260 - protein, 65 aa, synthetic construct
  REGION 1..65: note = Synthetic
SLQERFQRLARAAARYLGVKSVTVRVRNGTVHVTINAPDTRAYILLKIIKKVAEQEGVPVDVKIK

SEQ ID NO: 1261 - protein, 61 aa, synthetic construct
  REGION 1..61: note = Synthetic
DVERVRRRIFVVLWFAHQQKDPRYADLALKLAQTLVKLYPDNAHARAILREVKERVEKIKS

SEQ ID NO: 1262 - protein, 65 aa, synthetic construct
  REGION 1..65: note = Synthetic
DERRRLFVAIRNIALAVGVPSIRVVIHRGKFRVRVSGDDDNARKALKLIKEVAEKLGLEVTVEYR

SEQ ID NO: 1263 - protein, 55 aa, synthetic construct
  REGION 1..55: note = Synthetic
DVEKLVAEVALLALKRGDSRAMWKAIAILLNYRRGKLSSEEASKLLKTLAKRLKG

SEQ ID NO: 1264 - protein, 65 aa, synthetic construct
  REGION 1..65: note = Synthetic
GPEELEEIVRRFLPPKVVRYVRALIRALARLGAPPQIINYAIILFLRKQGLVSPEELEELEKLLK

SEQ ID NO: 1265 - protein, 61 aa, synthetic construct
  REGION 1..61: note = Synthetic
VREEALRIIFKAILLLMNGQISRREAAKIILLAREASKKNDEELIKKVKSLLDSVEKKNQS

SEQ ID NO: 1266 - protein, 62 aa, synthetic construct
  REGION 1..62: note = Synthetic
DLKQRVRHLMIRILLLARKKQDPRLRRLAARLALLAIEAQERNDEEKLDKVRKEAKKVVDSG

SEQ ID NO: 1267 - protein, 65 aa, synthetic construct
  REGION 1..65: note = Synthetic
PPVLERLLELLKRLGNPLREAVRALLRALRRGEIPPEKVLKRLLFAAYRLGDKEFFKLVAELFRK

SEQ ID NO: 1268 - protein, 59 aa, synthetic construct
  REGION 1..59: note = Synthetic
TRREAMFVLFVAHFAYRKGDKDMVHAAYEVAKKLLEKEPEDERVRKVLEIVEELLKKVS

SEQ ID NO: 1269 - protein, 65 aa, synthetic construct
  REGION 1..65: note = Synthetic
SAAEEALKLLREVLPPEEREILERILKELRKRFPPAAVIFLLAKILLKLGLIPPQVAAKVLEILR

SEQ ID NO: 1270 - protein, 64 aa, synthetic construct
  REGION 1..64: note = Synthetic
DAQRTVEKVIRHAQEFVSKKGDERIKKQVDTLAKKAQTLLKQGDEDSALEVAALLMHLLWVVKR

SEQ ID NO: 1271 - protein, 61 aa, synthetic construct
  REGION 1..61: note = Synthetic
DSEEAEKIIRRVLIFAIFQNDKKIFRSAFELLKILEEATKKGNEELIKKVTKIARKLLSYV

SEQ ID NO: 1272 - protein, 65 aa, synthetic construct
  REGION 1..65: note = Synthetic
SREDLFAWLLRRVVKRLGVPSVDVKVSGGRLTVKVKGTNQDARLAAAAAKVLARFFGIEVDVKVK

SEQ ID NO: 1273 - protein, 65 aa, synthetic construct
  REGION 1..65: note = Synthetic
DERRRFISRVLQIAQQLGVPRVLVLVKNGRFTVRVRGTDERAQKAKEAIEKLAKRLGLEVELKDG

SEQ ID NO: 1274 - protein, 65 aa, synthetic construct
  REGION 1..65: note = Synthetic
GPLEELEEILKELAKTDPAAKILLAALKLLRRRFDPRLVLMILELVARRLGNPELLKIIREILRK

SEQ ID NO: 1275 - protein, 65 aa, synthetic construct
  REGION 1..65: note = Synthetic
SHLERLIERALKTKDPRKLRIAIAYAWFLKERTGDPKLRRVVDLLARALVEKDPELIERALRVAR

SEQ ID NO: 1276 - protein, 63 aa, synthetic construct
  REGION 1..63: note = Synthetic
DEDTKAEKIAKDVLKDLVKKATTEREVLRALLHAIMVIRTLIPDQEKAKEVRRELAEIALKWL

SEQ ID NO: 1277 - protein, 64 aa, synthetic construct
  REGION 1..64: note = Synthetic
DREELKDLVSKVEELVRKVIKDPNYKSMATRLIKKAKELAKKGDEESAKRVIWMLIAIVFMYKR

SEQ ID NO: 1278 - protein, 65 aa, synthetic construct
  REGION 1..65: note = Synthetic
DVEELLEEAVKTNDPRLVREALRLLFKLLDRTGDPKLKRIIAYLLFALKKNDPKLLRQVVELLKR

SEQ ID NO: 1279 - protein, 52 aa, synthetic construct
  REGION 1..52: note = Synthetic
STESVKKALKKALKSGDARKAFRIVMLAKVFGLISEKEARKWRNLILKVSSI

SEQ ID NO: 1280 - protein, 65 aa, synthetic construct
  REGION 1..65: note = Synthetic
SELEEELKRAIEEGDRRLLARLLLRLSRLLGDPRRAVRLLLRLIARVLNVPPEEAAKILRRLLKT

SEQ ID NO: 1281 - protein, 64 aa, synthetic construct
  REGION 1..64: note = Synthetic
DPTRHHLLKRIFMVLMLFKIGKIDPSQAKTLLKRLQEKAKKIGDKAAVSLAELAIVLIKQAEKS

SEQ ID NO: 1282 - protein, 65 aa, synthetic construct
  REGION 1..65: note = Synthetic
SREELLEELEKKARNPELRDLIRLLKELLRRGDPKVRRVLFLLFFRARLNGNPELARLVMKVFKT

SEQ ID NO: 1283 - protein, 60 aa, synthetic construct
  REGION 1..60: note = Synthetic
SEQHLREWIKKVEEQIRRGTITIRWAMIVHILIRQAQKLGDEEVEKRLRELLRRIAEVFH

SEQ ID NO: 1284 - protein, 65 aa, synthetic construct
  REGION 1..65: note = Synthetic
SIEELLEKLLRELGVPPRQIKIVKAAFRRLRRLGLSPERALEVLTILLRQRGNPELAKAVRLVLK

SEQ ID NO: 1285 - protein, 65 aa, synthetic construct
  REGION 1..65: note = Synthetic
SERHIKHALALLRRGDPKRALFVLYYLARRTGDPRVKELLRLLLEAFLKNDPELLKRVRRLLEET

SEQ ID NO: 1286 - protein, 63 aa, synthetic construct
  REGION 1..63: note = Synthetic
NEQDKKFAKRLLDQAKKLADQISNDRLRKKAQSLVEKARKIDDPNVAMKVFVFVHLIYRHVQK

SEQ ID NO: 1287 - protein, 62 aa, synthetic construct
  REGION 1..62: note = Synthetic
SRKVIRELAMYVTRVAEKLGLDRRAFRRAFSLAYLLAERGVDPTQAKRILEKFLRTIKKRKS

SEQ ID NO: 1288 - protein, 65 aa, synthetic construct
  REGION 1..65: note = Synthetic
SLEEALEIIEKELGDPKLVKQLRAAIRVLKRFGADPFLILRILRRILKDADTPEARLALKILEET

SEQ ID NO: 1289 - protein, 61 aa, synthetic construct
  REGION 1..61: note = Synthetic
SELEKILREVAKRVYKKKGDPRTIMKVIYQIVQRLIKTLGLDEEQQRELMKRAFMVWMDVV

SEQ ID NO: 1290 - protein, 62 aa, synthetic construct
  REGION 1..62: note = Synthetic
SEHLKRILKAAVRFIARLLGLDEKAQKIAKKVAEKLADKGVDPKEALRLLIRVLQQLYVRLR

SEQ ID NO: 1291 - protein, 65 aa, synthetic construct
  REGION 1..65: note = Synthetic
DEVLERLRKLLRKLGNPHLVRVVEAFIKYFRRLGLDPRMIIFFLLKFARRLGDPELTRVIEEAIK

SEQ ID NO: 1292 - protein, 65 aa, synthetic construct
  REGION 1..65: note = Synthetic
SLLEELEELLKKLNTPVARLLIRVLRALLKRGRFSPKEILQILWSLARRQNDPEVVKVIEEILKK

SEQ ID NO: 1293 - protein, 65 aa, synthetic construct
  REGION 1..65: note = Synthetic
DELLEELEELLKKNDPKVRRLVLELLRLAEELGDPELFKRLRYIAAAVFLGNFKLALQVLKHILK

SEQ ID NO: 1294 - protein, 59 aa, synthetic construct
  REGION 1..59: note = Synthetic
PFKEILKTLYKLIQEALKKNDRRKVVRLYILLLRLMRRAQTEEARKLAFKLLLLVIDLG

SEQ ID NO: 1295 - protein, 65 aa, synthetic construct
  REGION 1..65: note = Synthetic
TEELEKLLEELLEKTGDPRVRILLRALRVLLRRLDPKQVVQILWSVARRLGNPEAQRLIEEVARK

SEQ ID NO: 1296 - protein, 65 aa, synthetic construct
  REGION 1..65: note = Synthetic
SLEELVKELASEALGRPPEAVEKALRHISERFQIPPKRAIRLLVRALLHADGDPRLKELYKLVTK

SEQ ID NO: 1297 - protein, 63 aa, synthetic construct
  REGION 1..63: note = Synthetic
SELLRSARRLLAFIALALARGVHAEEIIRWLEEWLKRARENQNKQEIYSAQAALLHARKWLER

SEQ ID NO: 1298 - protein, 64 aa, synthetic construct
  REGION 1..64: note = Synthetic
SPEEKAKKLAEAAVKFLVKLASEQIAKYNVSRFVEMVAKDLNLDDSQTEKLQKYAQTLVHQLYS

SEQ ID NO: 1299 - protein, 64 aa, synthetic construct
  REGION 1..64: note = Synthetic
PYEEEIKKYADTLLTLIKNAKDPRQRRRLSKELFTTLLKLLKAPNPEKRAAAAQVIFKVFRVLK

SEQ ID NO: 1300 - protein, 64 aa, synthetic construct
  REGION 1..64: note = Synthetic
KEIAKKLADKLVTEATKLATSSDPNNRTKAHKLILRAMMFARFANDPNVYRKVQSVYQLIRKLG

SEQ ID NO: 1301 - protein, 65 aa, synthetic construct
  REGION 1..65: note = Synthetic
SVELIEEALKLLGDPDARILVALIRYLRKLGVPPRLVEQILEKAARQLGSEEIFRRAKELAERLP

SEQ ID NO: 1302 - protein, 61 aa, synthetic construct
  REGION 1..61: note = Synthetic
SKHEVDLLVAFVMVIARTRGDPTARKIAAKLALEAMKAKDNNDDEKLKKVSKRLKSFIKTF

SEQ ID NO: 1303 - protein, 64 aa, synthetic construct
  REGION 1..64: note = Synthetic
SDEEDRLLKRALAYLWALKAGKISVHLAKLAVRRVIEKARRLGDEKAVKVAKKILEILKKIEKG

SEQ ID NO: 1304 - protein, 64 aa, synthetic construct
  REGION 1..64: note = Synthetic
PEELYKRATKILTEAKKRAKDNPEILRAIIRLEFLLRVAYKQNNEKTLKAVVKLVERKIRTLLS

SEQ ID NO: 1305 - protein, 62 aa, synthetic construct
  REGION 1..62: note = Synthetic
PEAKEVFRTLLEVLHKAREDGNKEVVKLASALVAYFFFARKRNDEELLKKVITLAKKVIKKQ

SEQ ID NO: 1306 - protein, 62 aa, synthetic construct
  REGION 1..62: note = Synthetic
SPVKEIINRALQILQKLLRLGLISPEEAQRLALFLLLAAKEGDEELARRLYKKIEKIRRKLS

SEQ ID NO: 1307 - protein, 65 aa, synthetic construct
  REGION 1..65: note = Synthetic
DKEYVKRLVEELIKRGDPHRALMVLFVELQHTGDPDIRRLFRLLARVIIRYPDPREVLKFFKKLK

SEQ ID NO: 1308 - protein, 65 aa, synthetic construct
  REGION 1..65: note = Synthetic
SKEEEAEKLLREVLPPRQRKLLEAILRILRKYAPPQLVIWLLAKILLRLGAIPPEVARRVEKILR

SEQ ID NO: 1309 - protein, 65 aa, synthetic construct
  REGION 1..65: note = Synthetic
SEDEQLSREVEKTIKKAGASHVLVRVKDGTLRVLVRRPSPEADQVLNKLRQKAKKLGLKFRWFIF

SEQ ID NO: 1310 - protein, 65 aa, synthetic construct
  REGION 1..65: note = Synthetic
SEELKELVERFERGEIPPKELFRLILRLLQRTGDPKLKRILAYLLFLIRRNVPPEEITRWLKAVT

SEQ ID NO: 1311 - protein, 65 aa, synthetic construct
  REGION 1..65: note = Synthetic
SELLRVMFVAHFLARRAGVPHVHVRVSNGRIQVTLKGTDERARTVQKRLTQFVRAFGVDVDVQVR

SEQ ID NO: 1312 - protein, 58 aa, synthetic construct
  REGION 1..58: note = Synthetic
SDELSKKLEKKVKDALKKGDKRRAKLLVIEALVQAKHLNDEKLHHVAVRLMFLIMKWS

SEQ ID NO: 1313 - protein, 62 aa, synthetic construct
  REGION 1..62: note = Synthetic
EEAREIIKLLFRAMQLASKKGNEKVVRIIKHIMARLFVALRSNDEKMIEDASKKAKKVIKII

SEQ ID NO: 1314 - protein, 65 aa, synthetic construct
  REGION 1..65: note = Synthetic
PEEFLEEIKRLLEKLRTPAAWLILRVLRKLEELGTSPEEILRILRALARRLGDPEVLRLVEEALH

SEQ ID NO: 1315 - protein, 65 aa, synthetic construct
  REGION 1..65: note = Synthetic
SKLEEVLELLKRVPDPRVHAVVAAILALLERGRYSPRKLLLLLHFLLKRLGDKDALELLERLRRR

SEQ ID NO: 1316 - protein, 61 aa, synthetic construct
  REGION 1..61: note = Synthetic
TEHEKVRLVVEVAERLIRRGDQRRAQFVLWIAELLVRKLGDEKWLKIIEELKKELEKLKKK

SEQ ID NO: 1317 - protein, 65 aa, synthetic construct
  REGION 1..65: note = Synthetic
SVEEVVELARRLGNPALAANLENIIRKLKRRGVPPRYILVALLYVARLAGDPEVARFIHELAKSP

SEQ ID NO: 1318 - protein, 65 aa, synthetic construct
  REGION 1..65: note = Synthetic
SVAEELEELLKRGNAEEAEKFLRELVERHGDPRLRIALRLLERLKKSGVPPEKVIRFVVAALRRL

SEQ ID NO: 1319 - protein, 65 aa, synthetic construct
  REGION 1..65: note = Synthetic
SEVARRLLELLKQGNEEEARRLVLRAAIRAAREGDKKLAHLLALVYFYLKTGNPAVEDLLRELEK

SEQ ID NO: 1320 - protein, 65 aa, synthetic construct
  REGION 1..65: note = Synthetic
PKERIKELARRIKEGDPEAKKELAKLFLEAVRRGDKRLFLAIIFILALVLRIPPREAARLLIRLG

SEQ ID NO: 1321 - protein, 65 aa, synthetic construct
  REGION 1..65: note = Synthetic
DKDKLLEAAVRVVARVAGVPDVKVRKRNGKVEVTFRGTNHQVQQASFMVKKIAERLGVTVTVRFE

SEQ ID NO: 1322 - protein, 65 aa, synthetic construct
  REGION 1..65: note = Synthetic
DERRRFISRVLQIAQQLGVPKVLVRVKNGRFTVRVKGTDERAQKAKELIEKAAKELGLEVELRDG

SEQ ID NO: 1323 - protein, 65 aa, synthetic construct
  REGION 1..65: note = Synthetic
SLRLKVAFLLVKAGVDPRLITRLLQYIHQLERRGVSPEEILKILIKILEELGDPRAAKLLRELLK

SEQ ID NO: 1324 - protein, 63 aa, synthetic construct
  REGION 1..63: note = Synthetic
DKEEVIKTVTKLLNEYTKRAEDPRKRLWAKAVVKMLQDLFKKDPDEAEHLARRISETVKKKLS

SEQ ID NO: 1325 - protein, 65 aa, synthetic construct
  REGION 1..65: note = Synthetic
SELKEVVERVLKGELSPEEVLRILLELAIRKGDPKYIYLWLWLRSALRRGNPELLRLILKQIRRA

SEQ ID NO: 1326 - protein, 63 aa, synthetic construct
  REGION 1..63: note = Synthetic
DRRRRFRLTQQILTTALELYKRDSRQAEKFLKTLKEEARRHNDYALWIATRLAEREFKSDTHD

SEQ ID NO: 1327 - protein, 65 aa, synthetic construct
  REGION 1..65: note = Synthetic
SELMEAVFLARRLGNPTVASFLMQLLFALKKGRISPEEVRRILEELLKKYGDPALELALELLRRK

SEQ ID NO: 1328 - protein, 62 aa, synthetic construct
  REGION 1..62: note = Synthetic
SRTDRVVKRLREILKEAKEKNDPKLAIKAAMFAHVFLKEDPTDEKIRKVFKEALKVALDLLR

SEQ ID NO: 1329 - protein, 56 aa, synthetic construct
  REGION 1..56: note = Synthetic
SEIEKKLRKLFKKAHEKGDLRALAYVLFAIKFLRRGKLDPRAAEQLARIAERRLRS

SEQ ID NO: 1330 - protein, 65 aa, synthetic construct
  REGION 1..65: note = Synthetic
SNSEELAKIIRQVARQARVPSFSVDVRNGRVHVTLHGDDAAVRHVLARAYMLARRLNVKVQVEIR

SEQ ID NO: 1331 - protein, 65 aa, synthetic construct
  REGION 1..65: note = Synthetic
SEDEKSKEISKTIQKLAGVDRVQVRIRKGRLLVFVRGSDERAQTALRLALEIAKRLGVPVTRHVQ

SEQ ID NO: 1332 - protein, 64 aa, synthetic construct
  REGION 1..64: note = Synthetic
PMDTFMVELAKRLADEIKKLAQDPNLQKKADKLKKLVDEAYKKNDHITLRFVVAMIILLWKRVL

SEQ ID NO: 1333 - protein, 62 aa, synthetic construct
  REGION 1..62: note = Synthetic
DQREILKVLREAWHTIRDASDRRVRAALRHLLVRLYEALRRKDEEALKKVLKRLKELIKEQK

SEQ ID NO: 1334 - protein, 65 aa, synthetic construct
  REGION 1..65: note = Synthetic
SVREAVEIILKRVGVSPEKINQLKANLWVLERRNPLAAEWLALKIIARVLNVSPKEAQRLLKELQ

SEQ ID NO: 1335 - protein, 65 aa, synthetic construct
  REGION 1..65: note = Synthetic
DKEEKIKKLAERLARRAGVPRVSITFHRGRVTITVDGPNSAVRRLAAYIFLFAEKLGIRLSVRSK

SEQ ID NO: 1336 - protein, 65 aa, synthetic construct
  REGION 1..65: note = Synthetic
NELFRLFEELVRRGISPEEILKLLVKLLREKGVDPQEIWRRLALILLQLGISPEEVARLVQKAVR

SEQ ID NO: 1337 - protein, 62 aa, synthetic construct
  REGION 1..62: note = Synthetic
DKDDEFLDKVRKTYESLQRNNVDPNQIVKILARLSMTAMELGLTRAMIFVIQLFLKAKQQAS

SEQ ID NO: 1338 - protein, 61 aa, synthetic construct
  REGION 1..61: note = Synthetic
VREEAEKIVRKARTMLKKGLIDEKEARKIIFLALHAAKNDDEELIRLVKRLLEQFEKKRQT

SEQ ID NO: 1339 - protein, 65 aa, synthetic construct
  REGION 1..65: note = Synthetic
DEEFRVRMLIRFLARLAGVPDVKVSVRNGTVHVKVRGTDRAARTALQVARIVALVLGVPVSVTIR

SEQ ID NO: 1340 - protein, 65 aa, synthetic construct
  REGION 1..65: note = Synthetic
SRDKAIRRLAELLGLSPEEVKKRLEELERKLGDPRRAVQVFLSELHRRGELTPRVRLFLLLIKRN

SEQ ID NO: 1341 - protein, 65 aa, synthetic construct
  REGION 1..65: note = Synthetic
SKKEILEKVLELLKKDPKKALRLIIELLRRTGDPRVKRIAAYILFLLRKGDPAARDIAEKLLKET

SEQ ID NO: 1342 - protein, 65 aa, synthetic construct
  REGION 1..65: note = Synthetic
DEVLERLLKLLRKLGNPQLVIIVEALIKALRRQGLPPRLIIQVLAAFARKRGDPELTRVIEEAIK

SEQ ID NO: 1343 - protein, 55 aa, synthetic construct
  REGION 1..55: note = Synthetic
DFVIVFVFEGRRTRTFFFRSEEQAKELVKRLQEKNPRAKVVTRHRGDRVIIFVDV

SEQ ID NO: 1344 - protein, 65 aa, synthetic construct
  REGION 1..65: note = Synthetic
SKEDEISKTLEKIAKRAGVPDVKVTVRNDRVKVEIKGNDRRALAAYLLLLRVARKLNLKVSVLLK

SEQ ID NO: 1345 - protein, 64 aa, synthetic construct
  REGION 1..64: note = Synthetic
DEKQQKLRRIAIRIFAFANFVGDPNVRTEVFRLAQHIMTVVQRDPDKAEELLRKLMTKVRRLTR

SEQ ID NO: 1346 - protein, 61 aa, synthetic construct
  REGION 1..61: note = Synthetic
TCTIEVVGVDPEAVEAIAAAFGAEVREKDGKLEIHLDDPHGAESAAAAISVLANVRVRLQC

SEQ ID NO: 1347 - protein, 61 aa, synthetic construct
  REGION 1..61: note = Synthetic
HCTIEVVGVDPEKVEAIAAAYGAEVCEKDGKFEIHLDDPHSAESAAVAISVLTNRPVRLQC

SEQ ID NO: 1348 - protein, 65 aa, synthetic construct
  REGION 1..65: note = Synthetic
DEHERVRKKVEKVVKDAGVPDFDVFVFDGYVVVLIKGSDESSQRARKAVIEWAKEQNIPLTVLEL

SEQ ID NO: 1349 - protein, 65 aa, synthetic construct
  REGION 1..65: note = Synthetic
DLHEKLKELAEFLAKLAGVPRVSVDVRNGTVSVTCHGRDAHCLALLLLLRLEARRQGLEVRVTVK

SEQ ID NO: 1350 - protein, 64 aa, synthetic construct
  REGION 1..64: note = Synthetic
DQITVIVHVDDPSLAEWVAKQCADQFLVNGKTVFLIVDGVDPTEAKRCVEELAKKANLEVELTV

SEQ ID NO: 1351 - protein, 65 aa, synthetic construct
  REGION 1..65: note = Synthetic
DEHERVRKKVEKVVKDAGVPDFDVFCFDGYCVVLIKGSDESSQRARKAVIEWAKEQNIPLTVLEL

SEQ ID NO: 1352 - protein, 65 aa, synthetic construct
  REGION 1..65: note = Synthetic
SLEEKLEEALKRGDEELVRRILEKILSEALDIPPEEVKEYLRALEERAGNPEAVIFLVLNLFQRR

SEQ ID NO: 1353 - protein, 65 aa, synthetic construct
  REGION 1..65: note = Synthetic
DEHERVRKKVEKVVKDAGVPDFDVFVFDGYVVVLIKGSDESSQRARKAVIEWCKEQNIPCTVLEL

SEQ ID NO: 1354 - protein, 54 aa, synthetic construct
  REGION 1..54: note = Synthetic
TDEELEKLAEYAAEAGDTEALLEIYSLISALRLGAISPEQADELARRIKERLDK

SEQ ID NO: 1355 - protein, 65 aa, synthetic construct
  REGION 1..65: note = Synthetic
DVEELVKFILELLKENREAAEFYLAHLLEKLGIPPEEIDEILKRVAELFKRDPEKARELIEKVLR

SEQ ID NO: 1356 - protein, 61 aa, synthetic construct
  REGION 1..61: note = Synthetic
TVTIEVCGVDPEAVEAIAAAFGAEVREKDGCLEIHLDDPHGAESAAAAISVLANVRVRLQE

SEQ ID NO: 1357 - protein, 63 aa, synthetic construct
  REGION 1..63: note = Synthetic
KVIIIHVHVDDYKSAEECAQKANVYVNVNGKHVTIFLDDIDPSVARKVEKCLRELNADVKVFV

SEQ ID NO: 1358 - protein, 65 aa, synthetic construct
  REGION 1..65: note = Synthetic
SEELEKLLKCVKEGDPECFKRVAEIIEELKKRDPEKAQLVEAALFLADNGILDPELIKFVVELVQ

SEQ ID NO: 1359 - protein, 61 aa, synthetic construct
  REGION 1..61: note = Synthetic
TVTIECVGVDPEAVEAIAAAFGAEVREKDGKLEIHLDDPHGAESAAAAISVLANVRCRLQE

SEQ ID NO: 1360 - protein, 65 aa, synthetic construct
  REGION 1..65: note = Synthetic
TIEELLEELRELGLIPPEVVELVKRVFKELAEKGDPRAMELLILVSDAVALNDPRAVEKLEELVR

SEQ ID NO: 1361 - protein, 65 aa, synthetic construct
  REGION 1..65: note = Synthetic
SEVERDLQFFIEAGVSPEAIHFLLANLLERTGDPRIEELLRLLAECLKRGIDPEECLEILLKFIK

SEQ ID NO: 1362 - protein, 59 aa, synthetic construct
  REGION 1..59: note = Synthetic
PRVIVIVDDPTVAELIVRRCNVKLVVRFGDQFLITLDDYQCAQTVARELQPDVLILTSE

SEQ ID NO: 1363 - protein, 65 aa, synthetic construct
  REGION 1..65: note = Synthetic
SKLEEILEEARRRNDPEIVELLEFLLELAKENPSEAVFLAENLLELYGDPLLELVVRVLEELVRR

SEQ ID NO: 1364 - protein, 65 aa, synthetic construct
  REGION 1..65: note = Synthetic
SDEDLELLAEWTGDPEQAIEALLFLADNRGDEKLVKILKKAVELLRRGEVSPEELIELIKELLRR

SEQ ID NO: 1365 - protein, 65 aa, synthetic construct
  REGION 1..65: note = Synthetic
DTEETLQTIVKELAKKAGVPSVEVDVVKGFIIVFLKGTDENAKKAFQLISKTCAELGYPCVVSTK

SEQ ID NO: 1366 - protein, 65 aa, synthetic construct
  REGION 1..65: note = Synthetic
SEIEEEAERAEEIKKLAGVPDVYVVVLNGRFFIQIQGDDETAKEAEKIIDKYCRDNNLECVVFIF

SEQ ID NO: 1367 - protein, 65 aa, synthetic construct
  REGION 1..65: note = Synthetic
PKLEEVLRKLLEEDPNNDCLRELLFVLERLRRLGVDPHQIEINLEFLVAANHDPECERLLKEAIK

SEQ ID NO: 1368 - protein, 65 aa, synthetic construct
  REGION 1..65: note = Synthetic
DELLEHLRFLVERLGDPEQVAEALLFLADNKGTAEELLKLLEELLRKTGDPEVKKILEIVERLLR

SEQ ID NO: 1369 - protein, 65 aa, synthetic construct
  REGION 1..65: note = Synthetic
TEDEKLAEEILQLARDLNLDDVLVFVNRGVVFVLINGNDDRAKKLKKLAETIAKKQGIDILILEL

SEQ ID NO: 1370 - protein, 65 aa, synthetic construct
  REGION 1..65: note = Synthetic
GPEELRKELEELGDPKCVEVLEDALALLEQGVDPESVKQFVELLADQRGCSPELVRKIKKAVEEK

SEQ ID NO: 1371 - protein, 65 aa, synthetic construct
  REGION 1..65: note = Synthetic
SESEKIEKDVTDIARKAGVPDVDVFLYNGEVVVVIKGDTESAQRAETLILRWCREQGVECTILIS

SEQ ID NO: 1372 - protein, 65 aa, synthetic construct
  REGION 1..65: note = Synthetic
SEVERDLQFFIEAGVSPEAIHFLLANLLERTGDPRIEELLRLLAELLKRGIDPEEVLEILLKFIK

SEQ ID NO: 1373 - protein, 65 aa, synthetic construct
  REGION 1..65: note = Synthetic
SLEEALEIIEKELGDPELVHQLRINIEFLKELGVSPEEILDLLRLILRQCNTPECRLALKILEET

SEQ ID NO: 1374 - protein, 65 aa, synthetic construct
  REGION 1..65: note = Synthetic
DEAERLKKELEDLGDPKCVEVLEDAIALLEQGVDPESVKQFVELLADQRGCDPELVERIKEVVEK

SEQ ID NO: 1375 - protein, 65 aa, synthetic construct
  REGION 1..65: note = Synthetic
SEELEKLLKLVKEGDPEAFKRVAEIIEELKKRDPEKAQLVEAALFLADNGILDPELIKFVVELVQ

SEQ ID NO: 1376 - protein, 65 aa, synthetic construct
  REGION 1..65: note = Synthetic
SEKVQEIAKELRERGNPAAHQAAINFEFLLDLGIDPEDVEFLVCRALEEDLGDPEEAKRICKLLK

SEQ ID NO: 1377 - protein, 61 aa, synthetic construct
  REGION 1..61: note = Synthetic
SELDKIVKKLTDICREAYKHNDAETIARAYETAKRLAHTYDDPKFRELAIRCFRLDHEVDR

SEQ ID NO: 1378 - protein, 63 aa, synthetic construct
  REGION 1..63: note = Synthetic
GVIIVEITNEEAKKCVSIARKVPLVQVFTSNNKVYFIIVRDERALRLIEECLKRGNVNFVTRH

SEQ ID NO: 1379 - protein, 63 aa, synthetic construct
  REGION 1..63: note = Synthetic
DRELTELLLDFYSAVAFLKQVPDPNAQTLAKKLEEKFRTALENDDDESLEKIVKEAERLANEQ

SEQ ID NO: 1380 - protein, 65 aa, synthetic construct
  REGION 1..65: note = Synthetic
SEYRTIDQLLARLALELGVGSFFVNCNDGRCTVFVLGNDEAAKIITEAAKKLSKTYGIPIEVVLF

SEQ ID NO: 1381 - protein, 65 aa, synthetic construct
  REGION 1..65: note = Synthetic
DCVLKILEELSKEDPRVREILELLERLAESHNLDPEDAVEALLFLLDNRGDPRVELLRKALELCK

SEQ ID NO: 1382 - protein, 51 aa, synthetic construct
  REGION 1..51: note = Synthetic
SNREAAEVVHLARKAGDPKALELAEELLQCLNEGDKECIDTLAKRIKKVIS

SEQ ID NO: 1383 - protein, 63 aa, synthetic construct
  REGION 1..63: note = Synthetic
DAHALLEIYSVLHFAKREGDEDLYKKVKSLLETAHKRAERASSEEEEHRIFQDAAKKVEKLVR

SEQ ID NO: 1384 - protein, 65 aa, synthetic construct
  REGION 1..65: note = Synthetic
GLEDVKKVIREVLSPEEVEELERLIEKLRELGISPRDIIRAILAELFILGNPEAFRLVLEVLHKE

SEQ ID NO: 1385 - protein, 61 aa, synthetic construct
  REGION 1..61: note = Synthetic
PRKELAKELAKELITKAVKHQDPEAERDAKQACDVLADAAGLSDEWCKEVVKELKDKAKKS

SEQ ID NO: 1386 - protein, 61 aa, synthetic construct
  REGION 1..61: note = Synthetic
SELDKIVKKLTDIAREAYKHNDAETIARAYETAKRLAHTYDDPKFRELAIRIFRLDHEVDR

SEQ ID NO: 1387 - protein, 65 aa, synthetic construct
  REGION 1..65: note = Synthetic
TIEELLEECRELGLCPPEVVELVKRVFKELAEKGDPRAMELLILVSDAVALNDPRAVEKLEELVR

SEQ ID NO: 1388 - protein, 65 aa, synthetic construct
  REGION 1..65: note = Synthetic
SLVEEVLEEVAKYVSPRLETEILLLVYSAKSAGLDPEEVVRLLLRFLRKLGDEEAVRVVEELIRK

SEQ ID NO: 1389 - protein, 65 aa, synthetic construct
  REGION 1..65: note = Synthetic
SESEKIEKDVTDIARKAGVPDVDVFLYNGEVVVVIKGDTESAQRAETLILRWAREQGVEVTILIS

SEQ ID NO: 1390 - protein, 65 aa, synthetic construct
  REGION 1..65: note = Synthetic
SEEFEKLVEELLRRGDLEKVKEVLKEAYEKLGDPRYHQALINLEFLEDNLSPEDVAFLVLRQLKD

SEQ ID NO: 1391 - protein, 61 aa, synthetic construct
  REGION 1..61: note = Synthetic
QILIEVHVSDPNLAESCARAVNATLLELPGGTFLIIVDTEELSKIVSTCLKRLGAEVHVVG

SEQ ID NO: 1392 - protein, 65 aa, synthetic construct
  REGION 1..65: note = Synthetic
PELLEELLKLLEELGDPELLQTIRFLLECVRRGECSPESALFLLLNEAQLLGNPIKEEIERLIRK

SEQ ID NO: 1393 - protein, 61 aa, synthetic construct
  REGION 1..61: note = Synthetic
DYEFQRLVLLLAQRAHECAEKNDEECLKKIESTAKKLKKEAQDPRIRRALQHVILAVQRLS

SEQ ID NO: 1394 - protein, 65 aa, synthetic construct
  REGION 1..65: note = Synthetic
GPEELRKELEELGDPKAVEVLEDALALLEQGVDPESVKQFVELLADQRGVSPELVRKIKKAVEEK

SEQ ID NO: 1395 - protein, 54 aa, synthetic construct
  REGION 1..54: note = Synthetic
SVQVVIHGEDDLHHFTVDSPEQARRIVTEWKKLYPDAKVFETEHDNVLILFVHN

SEQ ID NO: 1396 - protein, 54 aa, synthetic construct
  REGION 1..54: note = Synthetic
SFRELSRKALEIANELGDREAERRVFRINQALVEGEAPEEWAEKALKRLIKKLK

SEQ ID NO: 1397 - protein, 65 aa, synthetic construct
  REGION 1..65: note = Synthetic
DACKIASQILLKHPDPREVRELLKELIKRLEENGNPEEAELVKRLLELAKRDPREAQYLVFKCLY

SEQ ID NO: 1398 - protein, 51 aa, synthetic construct
  REGION 1..51: note = Synthetic
SNREAAEVVHLARKAGDPKALELAEELLQALNEGDKEKIDTLAKRIKKVIS

SEQ ID NO: 1399 - protein, 64 aa, synthetic construct
  REGION 1..64: note = Synthetic
DTFIVSHDKRFAEWCARAANVKFVIFELEGGEILIIVEGVSEEARELLDECFKILNQDNLIFVN

SEQ ID NO: 1400 - protein, 61 aa, synthetic construct
  REGION 1..61: note = Synthetic
TRILVIVHVEDPKKVEKCAKLAGVLLNTVGKSLLIVLNDNDPNRLEKCLRKVGAEFELIEF

SEQ ID NO: 1401 - protein, 65 aa, synthetic construct
  REGION 1..65: note = Synthetic
KILLIVFTEDEEALREVIELARRIHAVECIRIGDQALCELGDDEEAKKFLEFTKNERVKVTELEL

SEQ ID NO: 1402 - protein, 65 aa, synthetic construct
  REGION 1..65: note = Synthetic
SEEEHTEFLLRLLRENPLEFEFYIAHLIDRTGDPRLEELLRLIREALKEGDPELLEKLVRLLLKT

SEQ ID NO: 1403 - protein, 65 aa, synthetic construct
  REGION 1..65: note = Synthetic
SEEEYKKKIKELLRRGDLDRAYELAVEAYHRLGDPRFLEIAAEIFVLDAKGISPEEIVEILERLE

SEQ ID NO: 1404 - protein, 62 aa, synthetic construct
  REGION 1..62: note = Synthetic
DEAKRRAEILKKEAEKLIKNGNRTEALLLLYSALSFAEHKNDEKLYKLVETVKKEVESLANS

SEQ ID NO: 1405 - protein, 62 aa, synthetic construct
  REGION 1..62: note = Synthetic
TLVVICRVDNVEEVEKFARNADAKVYVNGKNVFVVLKSEEAAKKLTKWAKKMNAKECVVHKI

SEQ ID NO: 1406 - protein, 65 aa, synthetic construct
  REGION 1..65: note = Synthetic
SDEDLELCAEWTGDPEQCIEALLFLADNRGDEKLVKILKKAVELLRRGEVSPEELIELIKELLRR

SEQ ID NO: 1407 - protein, 65 aa, synthetic construct
  REGION 1..65: note = Synthetic
DEEFKEEAKELIKEGNPEEAVKVIEELAERLNDPELHQCAINLEFLLDAGFDPEDILFILELCLK

SEQ ID NO: 1408 - protein, 65 aa, synthetic construct
  REGION 1..65: note = Synthetic
SQSELVETLVKEVSELLEIPSLEVSCSNGSCTVTVKGNDSLAAAAAILIDNAALRVGVPVSVTFR

SEQ ID NO: 1409 - protein, 65 aa, synthetic construct
  REGION 1..65: note = Synthetic
SNCERASEAIRVALKAAGVPSFSVTVDNNSVTVTVRGNDEAVREALQNALFIADHFGCPVSLRTQ

SEQ ID NO: 1410 - protein, 65 aa, synthetic construct
  REGION 1..65: note = Synthetic
DIEELFRECRKKGLSPEECLKLIAELLWRSGDPELKSVAALLLLLLDNGVDPEEVLRDADFFLRL

SEQ ID NO: 1411 - protein, 65 aa, synthetic construct
  REGION 1..65: note = Synthetic
DEVEKLKKTVEQIAREAGIPDFDVFISDGQVFVLIKVHDERATKATKRILKVCKKLGIECSIVLA

SEQ ID NO: 1412 - protein, 65 aa, synthetic construct
  REGION 1..65: note = Synthetic
SEEYIREVIKLLREKGDPEAAEFVEELLRSLKDLSPEEVLHQIAAYLVAKGDPELLRIIFEALEK

SEQ ID NO: 1413 - protein, 65 aa, synthetic construct
  REGION 1..65: note = Synthetic
DVREVLEELLERGEVSPRVVTEILLEVYSARHAGISPEIIKELVVRSLERLGNPEVARLVEKLLR

SEQ ID NO: 1414 - protein, 65 aa, synthetic construct
  REGION 1..65: note = Synthetic
SIEERLEELCEKKNDPECREAVELFKLLVERTGNPEEVERQIEEAIEVTGDPDFRLALEILREAK

SEQ ID NO: 1415 - protein, 63 aa, synthetic construct
  REGION 1..63: note = Synthetic
PVVLFLIDAPPEAARWLYELVGVKRVISYEDGLYILEVDDEEAARKACELVARLFPIKVVCLK

SEQ ID NO: 1416 - protein, 63 aa, synthetic construct
  REGION 1..63: note = Synthetic
PRVIISCGDHGIEEAYKLVKSANAKVTLLGDVVFVENVDPREAEKVVRYLQSLGIPCFVFVLE

SEQ ID NO: 1417 - protein, 65 aa, synthetic construct
  REGION 1..65: note = Synthetic
SERFEELVRCAAKGDERCERVILFLIDLLKLRDEERAREVKKILELLKKDPDNEELLERLTRLLA

SEQ ID NO: 1418 - protein, 65 aa, synthetic construct
  REGION 1..65: note = Synthetic
PEEVLELLLEALERGDKDLLEEVKRLLEELAKTDPEVHQLLINAEFLEDAGFSPEDIVFLLKIQL

SEQ ID NO: 1419 - protein, 64 aa, synthetic construct
  REGION 1..64: note = Synthetic
PRIVCIVRVNSPYAEKVAKIAKKLGVHVLQHGNDIFLLDADEEVQRLVEEAKKYGVEVLCVEFE

SEQ ID NO: 1420 - protein, 51 aa, synthetic construct
  REGION 1..51: note = Synthetic
DLLQLLAHLLEIARRLGNEKALEVIDRAIKAWLEGDLETAKKLTKLARKLL

SEQ ID NO: 1421 - protein, 61 aa, synthetic construct
  REGION 1..61: note = Synthetic
TVTIEVVGVDPEAVEAIAAAFGAEVREKDGKLEIHLDDPHGAESAAAAISVLANVRVRLQE

SEQ ID NO: 1422 - protein, 65 aa, synthetic construct
  REGION 1..65: note = Synthetic
PEEVLELLLEALERGDKDLLEEVKRLLEELCKTDPEVCQLLINAEFLEDAGFSPEDIVFLLKIQL

SEQ ID NO: 1423 - protein, 64 aa, synthetic construct
  REGION 1..64: note = Synthetic
TIQEEVERIIREAQEFVSKKGDEDIKRKVDHLAELAQRLLKAGDERYAKIVAEALRAILLKVKQ

SEQ ID NO: 1424 - protein, 65 aa, synthetic construct
  REGION 1..65: note = Synthetic
TELLRELFRRALERGDNSQVLIDIWEICRIVAGGDPELTKRCFERIVQLLERDPEKARELLEKLG

SEQ ID NO: 1425 - protein, 63 aa, synthetic construct
  REGION 1..63: note = Synthetic
DEEKKELKERIDKLLRYAIEVVDNPEERKLFTELAKKIKKLLEKNPTEALLEAYSLAHYARLK

SEQ ID NO: 1426 - protein, 65 aa, synthetic construct
  REGION 1..65: note = Synthetic
TEDEKLAEEILQLCRDLNLDDCLVFVNRGVVFVLINGNDDRAKKLKKLAETIAKKQGIDILILEL

SEQ ID NO: 1427 - protein, 65 aa, synthetic construct
  REGION 1..65: note = Synthetic
DLKEEIEKLLRECGVSPEEIEELKIFFEELLKRASPEQVLEALIFLLDNKGDPCAAKLLLELLRK

SEQ ID NO: 1428 - protein, 65 aa, synthetic construct
  REGION 1..65: note = Synthetic
SEDEEIERAIREAAKRHGLTDVDCKVRNGTITCKVGGDDKDARAVLDFAELLADALGVPVNLRTG

SEQ ID NO: 1429 - protein, 65 aa, synthetic construct
  REGION 1..65: note = Synthetic
SEEHSRFVEELLKDNPAAAVFYAVNAVQNLRRRNEEEARRVEEELRKLLERLDPRLKEAFEYTLR

SEQ ID NO: 1430 - protein, 63 aa, synthetic construct
  REGION 1..63: note = Synthetic
DEEKKELKERIDKLLRYAIEVCDNPEECKLFTELAKKIKKLLEKNPTEALLEAYSLAHYARLK

SEQ ID NO: 1431 - protein, 65 aa, synthetic construct
  REGION 1..65: note = Synthetic
SESEKIEKDVTDIARKAGVPDVDVFCYNGECVVVIKGDTESAQRAETLILRWAREQGVEVTILIS

SEQ ID NO: 1432 - protein, 65 aa, synthetic construct
  REGION 1..65: note = Synthetic
SERFEELVREAAKGDERAERVILFLIDLLKLRDEERAREVKKILELLKKDPDNEELLERLTRLLA

SEQ ID NO: 1433 - protein, 64 aa, synthetic construct
  REGION 1..64: note = Synthetic
HLLVEVKDERVAREVAKLLNAPCIELHLPGDKYLFFCRGVSKEQAKRVAKTVHKKYKNVQLIVL

SEQ ID NO: 1434 - protein, 65 aa, synthetic construct
  REGION 1..65: note = Synthetic
SESEKIEKDVTDIARKCGVPDVDVFLYNGEVVVVIKGDTESAQCAETLILRWAREQGVEVTILIS

SEQ ID NO: 1435 - protein, 64 aa, synthetic construct
  REGION 1..64: note = Synthetic
KKCLVFVQDVDDDVVKKLSEVANVPVVKLPGNIVIFRVHDDELAERILKVAAEVGARVFINCHE

SEQ ID NO: 1436 - protein, 65 aa, synthetic construct
  REGION 1..65: note = Synthetic
NEAATEELKRLIKRLPNREEIEKLIKEVSELAGVPPEEVLRQVAQAVDFLGLPPEEVLRALLYQF

SEQ ID NO: 1437 - protein, 65 aa, synthetic construct
  REGION 1..65: note = Synthetic
DASRRVSTEALLNAYAAGVPHVRVEVKDGRVKVTLRGDTEAVRAATRAIKRLAEKQGVKVDLKVQ

SEQ ID NO: 1438 - protein, 65 aa, synthetic construct
  REGION 1..65: note = Synthetic
PFCAVDVEDEEAAKIIARELDGVLVTFSSGEALVYISGYDWKEVVKRAREIAKKLNVNVRIFCSE

SEQ ID NO: 1439 - protein, 65 aa, synthetic construct
  REGION 1..65: note = Synthetic
SVTELLLALYADLHYFGDPRVEEILRRVEELLHKGDPRTAIELVLRAAEELGNEHLKKLAEELLR

SEQ ID NO: 1440 - protein, 65 aa, synthetic construct
  REGION 1..65: note = Synthetic
DRSDLFALVLTALLRLGIPPEEVRRIAAEAFRLCGGDPECIIKIVKEILEREDPELARLFEENVK

SEQ ID NO: 1441 - protein, 63 aa, synthetic construct
  REGION 1..63: note = Synthetic
SEEEVEILKEEVKRIAKKACENNDEKTLHSLEAFAEIILDSNNNEEAKEILEYIRKVITDCSK

SEQ ID NO: 1442 - protein, 65 aa, synthetic construct
  REGION 1..65: note = Synthetic
DEVEKLKKTVEQIAREAGIPDFDVFISDGQVFVLIKVHDERATKATKRILKVAKKLGIEVSIVLA

SEQ ID NO: 1443 - protein, 65 aa, synthetic construct
  REGION 1..65: note = Synthetic
DRSDLFALVLTALLRLGIPPEEVRRIAAEAFRLAGGDPELIIKIVKEILEREDPELARLFEENVK

SEQ ID NO: 1444 - protein, 65 aa, synthetic construct
  REGION 1..65: note = Synthetic
SLEETVKKVVKKVATEAGAEDVDVFIYDGYVLVLFKGSDESAKLASELIHEILRRLGVEVTLLIL

SEQ ID NO: 1445 - protein, 65 aa, synthetic construct
  REGION 1..65: note = Synthetic
SLELLEEALRCLGDPAIEDVLFLVRELLESGDPYSALFLIANLLERLEEKGNPDCVKIIRKALEV

SEQ ID NO: 1446 - protein, 54 aa, synthetic construct
  REGION 1..54: note = Synthetic
SVVVLIFGEDSTHYFVVDSPEQARRIVTEWKKLYPDCEVREVEQNNQLILFVKC

SEQ ID NO: 1447 - protein, 65 aa, synthetic construct
  REGION 1..65: note = Synthetic
SEEEEDRALEEFIRRAADVPDVKVRCKDGTCTVTFNGNDEAAHQARINLEFLSDILGLDVKVRVK

SEQ ID NO: 1448 - protein, 65 aa, synthetic construct
  REGION 1..65: note = Synthetic
DRSDLFALVLTALLRLGIPPEEVRRIAAECFRLAGGDPELIIKCVKEILEREDPELARLFEENVK

SEQ ID NO: 1449 - protein, 65 aa, synthetic construct
  REGION 1..65: note = Synthetic
PEEFVREALRRLIPDPRLQKIVEEALELAKRLGIDPFEVLQILDFLLIYLGDPEEAAKILEELVR

SEQ ID NO: 1450 - protein, 65 aa, synthetic construct
  REGION 1..65: note = Synthetic
SLVEELERLLEEAGVDPELIEKLSAVILQLLIRGLDPKDVLRFLLEMLERDGNPLRRVVEELLKR

SEQ ID NO: 1451 - protein, 65 aa, synthetic construct
  REGION 1..65: note = Synthetic
SIDEELERLLEEAGVDPELIDDLYAVIYQLYIRGLSDKDVLRFLLENLERDGTPLRRVVEELLKR

SEQ ID NO: 1452 - protein, 65 aa, synthetic construct
  REGION 1..65: note = Synthetic
SVEEFLKKLVEEFGVPPEEVERALEIIARLLNVPPEAALFFLIAIILDYNVPPEEAVEIVRRNVT

SEQ ID NO: 1453 - protein, 65 aa, synthetic construct
  REGION 1..65: note = Synthetic
DESAAEQIARLLIQGDPAAKQTVRAFVQAAKRGNPAAKRALEVIRKVLRKLGNPEVVKKVKKLIK

SEQ ID NO: 1454 - protein, 65 aa, synthetic construct
  REGION 1..65: note = Synthetic
TEEIARRIVEALERGDEHLYFDLLQKLSLLVVRGDPVAREILEVIREAIRRNDPDLLRELLKRLG

SEQ ID NO: 1455 - protein, 65 aa, synthetic construct
  REGION 1..65: note = Synthetic
DEERRHAEKLLRKGDLKTLKKLVKRLIKRVGDPNLKLQLLQVEMVEKFGDPHVALLLLVFIVKEG

SEQ ID NO: 1456 - protein, 60 aa, synthetic construct
  REGION 1..60: note = Synthetic
RDELKERIFKTIVRAVVTGDPELLKEAKKLLEKLKKLGRLDQSAKQLEKAVRFVEKQLRS

SEQ ID NO: 1457 - protein, 60 aa, synthetic construct
  REGION 1..60: note = Synthetic
RDEIKERIFKAVVRAIVTGNPEQLKEAKKLLEKLKKLGRLDQDAKKFEKAIRQVEKRLRS

SEQ ID NO: 1458 - protein, 62 aa, synthetic construct
  REGION 1..62: note = Synthetic
DEIEKRLRTALEELVRADKNNDEEKVRKAWQKAVQIVIEANDDNVSKLASKIYRELAKRVKS

SEQ ID NO: 1459 - protein, 51 aa, synthetic construct
  REGION 1..51: note = Synthetic
SPEEELKKLEKIAKKKGDTRALSVIQVAKKAYKKGDEWTLRIALHIAKQLL

SEQ ID NO: 1460 - protein, 62 aa, synthetic construct
  REGION 1..62: note = Synthetic
DEIEKRLRTALEELVRAVKNNDEEKVRKAWEKVVQIVIEANDDNVAKLASKLYKEIEKRVKS

SEQ ID NO: 1461 - protein, 62 aa, synthetic construct
  REGION 1..62: note = Synthetic
DEIEKRLRTALEELVRAVKNNDEEKIRKAWQKVVQIIIEANDDNVAKLASKLWREIEKRVKS

SEQ ID NO: 1462 - protein, 62 aa, synthetic construct
  REGION 1..62: note = Synthetic
DEIEKRLRTALEELVRASKNNDEEKARKAFLKVVQIVIEANDPNVSRLASKLYKEIEKRVKS

SEQ ID NO: 1463 - protein, 62 aa, synthetic construct
  REGION 1..62: note = Synthetic
DWKDQASELLDKLIKKARSNRDDELAKEVLKLLLRARWASHLSDDERAKKLLKKIVEEARKM

SEQ ID NO: 1464 - protein, 51 aa, synthetic construct
  REGION 1..51: note = Synthetic
SDEKLKRLEKIAKKKGAWKALVAIHLAKLASKRGDEKTLRSAEKLAEKILS

SEQ ID NO: 1465 - protein, 63 aa, synthetic construct
  REGION 1..63: note = Synthetic
DEEEKRILKKLKEVLRSLSSIPDPTAQKVVETAWKLAVEAVIKNDKELLKKVAEYAERILKKA

SEQ ID NO: 1466 - protein, 53 aa, synthetic construct
  REGION 1..53: note = Synthetic
DESLKLLRKADKGAREKQISEKELKKAVEEARRRGLEEVAHYLELLLWVLRLL

SEQ ID NO: 1467 - protein, 64 aa, synthetic construct
  REGION 1..64: note = Synthetic
NAEEILEKATLIAIEAWMLAKDEEVKKLVRTLARQVRKLLSNNDDDSAKSVLDTLKSVLEDLKS

SEQ ID NO: 1468 - protein, 64 aa, synthetic construct
  REGION 1..64: note = Synthetic
NAEEITEKATLVGIEAWLLAKDEEQKKKVRTLNRQVKKLLQQNDLDQAKRVLDQLKSVLEDLKS

SEQ ID NO: 1469 - protein, 65 aa, synthetic construct
  REGION 1..65: note = Synthetic
TERDLAFLIVSNVSPEQQEKFKKTLKKIADELRKRAKDRGLSVSIDVKQIRINGTDIVLIDVQVD

SEQ ID NO: 1470 - protein, 65 aa, synthetic construct
  REGION 1..65: note = Synthetic
DELEKLLRELGVPPEVIEELKRLYEELRKKGIPEEEVLRILFRILLERGDPALAAFTLVAVLLYI

SEQ ID NO: 1471 - protein, 65 aa, synthetic construct
  REGION 1..65: note = Synthetic
DELEKCLRELGVPPEVIEELKRLYEELRKKGIPEEEVLRILFRILLERGDPALACFTLVAVLLYI

SEQ ID NO: 1472 - protein, 65 aa, synthetic construct
  REGION 1..65: note = Synthetic
DEEILRKIEEIIKRLGNEDLERVLRELKEALERGDEEEYKALLVLLAILAYILGDPDVARLVRKL

SEQ ID NO: 1473 - protein, 65 aa, synthetic construct
  REGION 1..65: note = Synthetic
DLIERLIKIARELGDEEAVRLLEKALEALKRGDYETVLKLLREVYKLLGDPEVTVVAVLLYIEAI

SEQ ID NO: 1474 - protein, 65 aa, synthetic construct
  REGION 1..65: note = Synthetic
SVEECLERLKREGVLPPELLKRIEEAIELAKRLGDEEALRVLELACRLGNEYAILAVIYVIELEV

SEQ ID NO: 1475 - protein, 65 aa, synthetic construct
  REGION 1..65: note = Synthetic
SLEEKIEEAIRRNDPELVLELLKKLAELRNDPYLRRVARALELAVRLGNPVLVYAELILVELLVK

SEQ ID NO: 1476 - protein, 65 aa, synthetic construct
  REGION 1..65: note = Synthetic
DEERLRRLGVPPEVVELLKRLYRELEKQGIPPEAIVAYLYVIAVELNDPELEKALRLLAKILLTE

SEQ ID NO: 1477 - protein, 65 aa, synthetic construct
  REGION 1..65: note = Synthetic
DLSERVLKAIALAVKLGNEVLFKAQIILASITLGVPPEEVLKLAKELAKRLGLLSPEELELLERL

SEQ ID NO: 1478 - protein, 65 aa, synthetic construct
  REGION 1..65: note = Synthetic
DLSERVLKAIALAVKLGNEVLFKAQIILCSITLGVPPEECLKLAKELAKRLGLLSPEELELLERL

SEQ ID NO: 1479 - protein, 65 aa, synthetic construct
  REGION 1..65: note = Synthetic
DVTITIIVFTNGEFTIYRIRVGPDPREKKEAQKLIDEISTKAKKLGGSVWVWRQDGTDRQEYHYK

SEQ ID NO: 1480 - protein, 65 aa, synthetic construct
  REGION 1..65: note = Synthetic
DVNVYAAAISVVLAKDPQALEALKELAKKLGDEELLRAVELFEEALRRGDEELLRKASELLLRLA

SEQ ID NO: 1481 - protein, 65 aa, synthetic construct
  REGION 1..65: note = Synthetic
DISYVTVFRSSPGNEDEYRKWKKKVEKVQKDLKKKAEELGLTIKVRSNRVRQGDSTFYFVFIWVE

SEQ ID NO: 1482 - protein, 65 aa, synthetic construct
  REGION 1..65: note = Synthetic
SDNKVELFIFVNGNPEQYKEAEKRLKKIAKKLTDEARKRGQRVSYSIRKTSRGNVVLVVLEVQTD

SEQ ID NO: 1483 - protein, 65 aa, synthetic construct
  REGION 1..65: note = Synthetic
PKEVAEILEECARKAGDEDVEELIKELKEAIKRGDEEEIRALLVLLAILLYILGLPECAEVARKA

SEQ ID NO: 1484 - protein, 65 aa, synthetic construct
  REGION 1..65: note = Synthetic
DEEELIAEAAAVSAAFIPDEEVAEKVVEAAVRLCLKLGVSEEECREICERAGVDPRLCEKILRKL

SEQ ID NO: 1485 - protein, 65 aa, synthetic construct
  REGION 1..65: note = Synthetic
SYWIVVQSDDGGRLEFIIVEVDDDPEDLKRAEELARRIAKKLTSRGLRVQVWVLDGSKWSTIKIE

SEQ ID NO: 1486 - protein, 65 aa, synthetic construct
  REGION 1..65: note = Synthetic
DLEEIIRLLKKVAKELGDEEALRLAEKAEKALKDGDPDEVKALLVLIAILAYIKGNPELAEVARS

SEQ ID NO: 1487 - protein, 64 aa, synthetic construct
  REGION 1..64: note = Synthetic
DLEEELKELGDPHILALVLLSAAYVEGDEELVRVVKEILKLLESGKISEEEALELLERALKEIK

SEQ ID NO: 1488 - protein, 65 aa, synthetic construct
  REGION 1..65: note = Synthetic
DERCAELLERIAEKLGDEELKELVKELKRALKEGDEEEFRALLVLIAILAYILGDPEAAEVARKC

SEQ ID NO: 1489 - protein, 65 aa, synthetic construct
  REGION 1..65: note = Synthetic
SVEIVVVVTYNGKTERYRLHVGDDPEERKKAEKFVKKVTKRAKELNARVWVAIFDGHEVDFSAYQ

SEQ ID NO: 1490 - protein, 65 aa, synthetic construct
  REGION 1..65: note = Synthetic
DQRVTVFIFYNGDRKIETYRYGTDEEAEKKLKKLIKDWKRKARKLGGIVIIAVRNGDKIRFWWVW

SEQ ID NO: 1491 - protein, 65 aa, synthetic construct
  REGION 1..65: note = Synthetic
DDIEWYIIVVDSRDSKSQQEARDKLETIASKISKKVKKNNGRVSYKIRTYSFNNRIAFILEVKWG

SEQ ID NO: 1492 - protein, 65 aa, synthetic construct
  REGION 1..65: note = Synthetic
DEELLERAIKLLREGNPDEAAEVLRKLYKILAEKGTPAAADISLALVLLYIGNPKLARKVLEKLK

SEQ ID NO: 1493 - protein, 64 aa, synthetic construct
  REGION 1..64: note = Synthetic
DEDDLDLRVTVLLLAWMAVLDNRPYTYSVNVNGYNLTVTFDTDPSQAQKAAEDFVKKYEQLKRN

SEQ ID NO: 1494 - protein, 65 aa, synthetic construct
  REGION 1..65: note = Synthetic
TEHQIWRIRVKGTDEEAQKKVEKAVKKVKDTAKEQARKQGKSVEVVVRQFHFGDTIFVIIVVSIG

SEQ ID NO: 1495 - protein, 65 aa, synthetic construct
  REGION 1..65: note = Synthetic
DEELLRTLKRLSPEAREIAEILERLLRNGIIPPEEAEELLRAVKTCLDRGNPLACEAQKLLVEVN

SEQ ID NO: 1496 - protein, 65 aa, synthetic construct
  REGION 1..65: note = Synthetic
TEELREVYKILREVDPEAAAAVTILLVLLYLDPDDEEVRKLAELITEAVRRGDPELIEKLAREIN

SEQ ID NO: 1497 - protein, 65 aa, synthetic construct
  REGION 1..65: note = Synthetic
DEEAVECLKKLIPDPEVRKLLEELLERAKRGDPEAKEILELLRELCKLGNTEAVHTILAVLLYIK

SEQ ID NO: 1498 - protein, 65 aa, synthetic construct
  REGION 1..65: note = Synthetic
SEWDFVLWEFNKDDPDQRKKAEKKVKDFEKKAREKAKRKNVPITVKRRSFTKDGTVFIVVEVEVG

SEQ ID NO: 1499 - protein, 65 aa, synthetic construct
  REGION 1..65: note = Synthetic
DIILEAALIALEITGSPEFLKAAKKYAEKLGDEELVRLIEKLLEALERGDEELYRELLELVKRLL

SEQ ID NO: 1500 - protein, 65 aa, synthetic construct
  REGION 1..65: note = Synthetic
DELSKELEELIKNGDLETVLKIAEELVRKVGDPRAEKVLEAIKEAIERRNPVLVYAAVALLLHLT

SEQ ID NO: 1501 - protein, 65 aa, synthetic construct
  REGION 1..65: note = Synthetic
SELAEKLLEALERGDRAALTLLLIKLYIELLKKFPPKEVKKIVRTVLELLKRDPEKAKELLEKLR

SEQ ID NO: 1502 - protein, 65 aa, synthetic construct
  REGION 1..65: note = Synthetic
SEVDFYLILLDGNDEDAQKTADRLVKEISKTATEEAKKNGGSVKIHVTKWHSGELLIVIVEVNID

SEQ ID NO: 1503 - protein, 65 aa, synthetic construct
  REGION 1..65: note = Synthetic
SIKISIWVLYNGRTERYEVSVGDSPEEQKKAKKEVKKIVDTARKLGAIVVVFNRNGEDLEFHFDV

SEQ ID NO: 1504 - protein, 65 aa, synthetic construct
  REGION 1..65: note = Synthetic
SVDEVAERILRTGDPELVKKLEELLEELCKTDVLACAALLVLKVALELNDKDLVELVLRALKRIF

SEQ ID NO: 1505 - protein, 65 aa, synthetic construct
  REGION 1..65: note = Synthetic
NVCLALELGNDVNLYAALALLLVEAKAKNDEELLRKLEEVERLAKEALEKGDEELLKEVCELYRK

SEQ ID NO: 1506 - protein, 65 aa, synthetic construct
  REGION 1..65: note = Synthetic
TEACLVLLAILAYIKGNPEVAELVRELAKLALEGKVPPEELTKLLEKLLRELGDPEVLKLLKECL

SEQ ID NO: 1507 - protein, 65 aa, synthetic construct
  REGION 1..65: note = Synthetic
DDFEFYVFKIDVKDEEDKKKAEKYAKKVKKDIEKHFKDRGLDVKVKLWYDTLNGEFFFVVFVRSR

SEQ ID NO: 1508 - protein, 65 aa, synthetic construct
  REGION 1..65: note = Synthetic
SFEELARLIEKIARELGDEELEKVARLLKECLKKGDTVCLIALLALLYVKAYEKRDEEAKKAARS

SEQ ID NO: 1509 - protein, 65 aa, synthetic construct
  REGION 1..65: note = Synthetic
DKEEIYIVLLFNVSEEDVKKAHETLKKTAEKLKREAEKRGQKFTFSIKVVEWGDIWFILLTVHKG

SEQ ID NO: 1510 - protein, 65 aa, synthetic construct
  REGION 1..65: note = Synthetic
DQKVTVFIAYNGDRKIEHYRYGTDEEAEKKLKKLIKDWKRKARKLGGNVVIVVRNGDDFRVWIVF

SEQ ID NO: 1511 - protein, 65 aa, synthetic construct
  REGION 1..65: note = Synthetic
DVERVEKAIKLAVEEGNELLVRVALYLLAAYLESLGNPEEAKRVKELLELLERGEVPPEEILKLL

SEQ ID NO: 1512 - protein, 65 aa, synthetic construct
  REGION 1..65: note = Synthetic
DEEAIRLIEEALRLNIDPHILELAVIAVLAVLSLQLGDPEKAKEIIKRLLEELGDEEAKKLLEKA

SEQ ID NO: 1513 - protein, 65 aa, synthetic construct
  REGION 1..65: note = Synthetic
SSVDFINVFLQGASPEQVKKVEDEVRTWAKKVKKTWKKKGKDVKVSVWVDTVNGAYAIYVFVQVD

SEQ ID NO: 1514 - protein, 65 aa, synthetic construct
  REGION 1..65: note = Synthetic
DEHYVVIVSFKDVSPEQQKKAEKIVQDFTKHLTEKAKKRGLDVKYVRWSWEFNGKTVVIVIVTVR

SEQ ID NO: 1515 - protein, 65 aa, synthetic construct
  REGION 1..65: note = Synthetic
DDFDIFLYNIDSTDPEQIKHARKLAEKFAKDVTDDAKKRGQRVKVSILQINWGNQVNFAVFVHIK

SEQ ID NO: 1516 - protein, 65 aa, synthetic construct
  REGION 1..65: note = Synthetic
SVTVYVWVNDNGQEDTITVTLGDDPSEQEKAKQVARDLNKRAKELNLEVAVWVDYGDRVELWLVF

SEQ ID NO: 1517 - protein, 65 aa, synthetic construct
  REGION 1..65: note = Synthetic
SERRIYFIYLDGNDEDAQKTADRLVKEISKTATEEAKKNGGSVKIDVTKWHFGATLLVLVRVNID

SEQ ID NO: 1518 - protein, 64 aa, synthetic construct
  REGION 1..64: note = Synthetic
PEVLVYVVVEDWRKVSEVARRLGAKVWTFGDVVFVAFENVPPEVAKKLAETLSKLAQVSVWVIG

SEQ ID NO: 1519 - protein, 65 aa, synthetic construct
  REGION 1..65: note = Synthetic
LTIRIWEWKYTNISPEQQKKVEKKIRELAKKLQKEAKERGQRVTVVVFRFESNNRVLFLLISIFR

SEQ ID NO: 1520 - protein, 65 aa, synthetic construct
  REGION 1..65: note = Synthetic
DKEELTELAKEAVKKGDFELLERLLEEARRRGDEEAVRLILKLLAKVALELKDPEILALLAYLYV

SEQ ID NO: 1521 - protein, 65 aa, synthetic construct
  REGION 1..65: note = Synthetic
CEELVKELGAPPEVEKVCRLVEKLLRERGVPPEEIRVLLYALAIILLLLLELGDEETVKRIRERL

SEQ ID NO: 1522 - protein, 64 aa, synthetic construct
  REGION 1..64: note = Synthetic
SRVWISVTDEKAARVISKLVNVKRVLKRGDFVFLSVDLDWRKAKSIAEKVSKELQVPIFVFWVP

SEQ ID NO: 1523 - protein, 65 aa, synthetic construct
  REGION 1..65: note = Synthetic
DEIEDLLEKAKEKGTEEEVLRRLIEEAEKEGDELLVLVLRALLEAVKLGNEVLTRAALILASVTR

SEQ ID NO: 1524 - protein, 64 aa, synthetic construct
  REGION 1..64: note = Synthetic
STVAIFVDDWKAAEEVAKVVNAEVEVTRKNGVYFIEVAISDEDKARKVVELLKKVGVEVVIILP

SEQ ID NO: 1525 - protein, 65 aa, synthetic construct
  REGION 1..65: note = Synthetic
DELLEELLERCDTPVCRELLKLFRECKERGVPPEACVAYLYVFAVELNDPEVEKVLREAAKLVLS

SEQ ID NO: 1526 - protein, 65 aa, synthetic construct
  REGION 1..65: note = Synthetic
DIALLALAYVLAVEVGDPELEEFVRRLAECLLRGECPPEEVRRLLEEFIEAVERNDEELLKRLVS

SEQ ID NO: 1527 - protein, 64 aa, synthetic construct
  REGION 1..64: note = Synthetic
GWIFVIISDWKKAYKYAKSLGVKVEVWTWDNRRYAVVLKDVSEEVSRSLKEWASRVGAHFIVFF

SEQ ID NO: 1528 - protein, 65 aa, synthetic construct
  REGION 1..65: note = Synthetic
GEYDFILVDVRGDDPNKEKKARDTLKEFARTLEEKAKKRGLDVKYSLFEIQLKGDIFFVLEVHVD

SEQ ID NO: 1529 - protein, 64 aa, synthetic construct
  REGION 1..64: note = Synthetic
DEFEEKVTKIIRKVAKEARKKNRPLRVRVTVNGTTIDILVPPDPDLATTMAKLAIMYVKIRQDI

SEQ ID NO: 1530 - protein, 65 aa, synthetic construct
  REGION 1..65: note = Synthetic
SENEVVFWRFNKDDPDQRKKAEKKVKDFEKKAREKAKRKNVPIDVKKISFTINGRVIIFVVVTVG

SEQ ID NO: 1531 - protein, 65 aa, synthetic construct
  REGION 1..65: note = Synthetic
GHLSLSTYEFQTSDPRDAHRLVKELKKELEKEAKDLRRKGLDVKIWVWVNQIGDSVVVWVFKRTE

SEQ ID NO: 1532 - protein, 65 aa, synthetic construct
  REGION 1..65: note = Synthetic
TEILVYAELILVEVAIEAGDEDLARLAVEALKRLGDPRAKEIARLLEECIKRKDPELCKEIIKKA

SEQ ID NO: 1533 - protein, 65 aa, synthetic construct
  REGION 1..65: note = Synthetic
PYCKEAAKVLLEAIEAGDEYATAAALYVLKLLCGDPEEVKKLLEEVAKELGVPPEVVELAKKLLE

SEQ ID NO: 1534 - protein, 65 aa, synthetic construct
  REGION 1..65: note = Synthetic
SEVDVVIWAFNKDDPDQRKKAEKKVKDFEKKAREKAKRKNVPITVHKSTFTVNGLVFISVIVEVG

SEQ ID NO: 1535 - protein, 65 aa, synthetic construct
  REGION 1..65: note = Synthetic
SDFRFWKYSVEGTDEEAKKEIKKFVKTATTRAKKLAKELNRSVTIRYFIHSDDNSIDVIVVVVVQ

SEQ ID NO: 1536 - protein, 65 aa, synthetic construct
  REGION 1..65: note = Synthetic
DDIDFFIFTIDVKDEEDKKKAEKYAKKVKKDIEKHFKDRGLDVKVTLYYDTLNGTFWFVVWVRSR

SEQ ID NO: 1537 - protein, 65 aa, synthetic construct
  REGION 1..65: note = Synthetic
SEEEVVSWTFNKDDPDQRKKAEKKVKDFEKKAREKAKRKNVPIFVWKQWFTKDGTVSIVVWVVVG

SEQ ID NO: 1538 - protein, 65 aa, synthetic construct
  REGION 1..65: note = Synthetic
AEIVRVRFKYDKSDSKSEKKAKDTAKKISDEVKKKAEKKGLPVSVWSNTLEKDGKVKFFLVVFVG

SEQ ID NO: 1539 - protein, 65 aa, synthetic construct
  REGION 1..65: note = Synthetic
DQKVVVWIFYNGDTKRETYRYGTDEEAEKKLKKLIKDWKRKARKLGGSVVIFVRNGDHVRVWIVF

SEQ ID NO: 1540 - protein, 65 aa, synthetic construct
  REGION 1..65: note = Synthetic
DFVIFLVTWFDGDDDRAKKVVKKIKKEATKLAQKLSKEYNLSYSVETKKRTFNGQVVVQIALRVK

SEQ ID NO: 1541 - protein, 65 aa, synthetic construct
  REGION 1..65: note = Synthetic
SIVDFYIYRFDARDPDQRRSAKEILTRVRKRLTKEAKKQGLDVKVTLFSRQDGTTLNVVVAVWVD

SEQ ID NO: 1542 - protein, 65 aa, synthetic construct
  REGION 1..65: note = Synthetic
DKVYLYWYVVKGTDEEAKKIADKLRKDAKKHAKKYAQSVGGSVRVRVRYYESGDIIVLVVVVTVR

SEQ ID NO: 1543 - protein, 65 aa, synthetic construct
  REGION 1..65: note = Synthetic
SDIILYVYTFTGPDAEEKARKTATKVVKKVATKLRKKVGVDKFKYLILVRKKDGTVLVVIFVRVE

SEQ ID NO: 1544 - protein, 65 aa, synthetic construct
  REGION 1..65: note = Synthetic
DEFYIYLYEVKGTDEEAKKIADKLRKDAKKHAKKYAQSVGGSVRVTVRYREDGDAIFLVVFVTVR

SEQ ID NO: 1545 - protein, 65 aa, synthetic construct
  REGION 1..65: note = Synthetic
SEELIETIKELLKRVPDPRVRELARKALKLAEELGDPELLKLLKTCLDRGNPLCVEAQALLIEVN

SEQ ID NO: 1546 - protein, 65 aa, synthetic construct
  REGION 1..65: note = Synthetic
PLEERAEEAIIKALKLGNPVNIHAQLALIAVALGVPPEEVLKLVLKKAKERGLLSPEELKLLKEL

SEQ ID NO: 1547 - protein, 65 aa, synthetic construct
  REGION 1..65: note = Synthetic
DVLFLVAVFNNGSAEWFRVRVGPDPSEKKKAKKLVKEFVERARRKGALVVVQTIDGDKQEHQFYK

SEQ ID NO: 1548 - protein, 65 aa, synthetic construct
  REGION 1..65: note = Synthetic
DVFAVYIYTVKGTDEEAKKIADKLRKDAKKHAKKYAQSVGGSVRVRVWFREDGDTILLVVLVRVR

SEQ ID NO: 1549 - protein, 65 aa, synthetic construct
  REGION 1..65: note = Synthetic
DWQAVWIYFVDGTDEEAKKIADKLRKDAKKHAKKYAQSVGGSVRVRVRFLEFGDIIVLYVEVTVR

SEQ ID NO: 1550 - protein, 65 aa, synthetic construct
  REGION 1..65: note = Synthetic
DVEEAERLAKELGDPDILEALKELKERLKKGDPEAEEIIKLLSELLKEGNKEAVHTIVAVLLYIK

SEQ ID NO: 1551 - protein, 65 aa, synthetic construct
  REGION 1..65: note = Synthetic
DLVEELAKLALELGDLELIALVAHLYVAILAGDPELLKELLKELKEVARKLGDPRIERLVRLIEE

SEQ ID NO: 1552 - protein, 65 aa, synthetic construct
  REGION 1..65: note = Synthetic
DELCKVVLELLERGVSPEEVKEIAKELGFSEEQVEVLLTVFAVLKYLGVPPEEIEEACKLLIKLE

SEQ ID NO: 1553 - protein, 65 aa, synthetic construct
  REGION 1..65: note = Synthetic
DIQWIDVAFVDGTDEEAKKIADKLRKDAKKHAKKYAQSVGGSVRVRVHWREWGNLIALFVEVTVR

SEQ ID NO: 1554 - protein, 65 aa, synthetic construct
  REGION 1..65: note = Synthetic
SELEEELKRLLCEGDPKKVEKLIRELAKRLGRPPRAVLRKLYKELARRGDPCAAALTVLAVRLYV

SEQ ID NO: 1555 - protein, 65 aa, synthetic construct
  REGION 1..65: note = Synthetic
DQKVSVSIVYNGDLKIEHYRYGTDEEAEKKLKKLIKDWKRKARKLGGFVVIIVHNGDEVRIWLVF

SEQ ID NO: 1556 - protein, 65 aa, synthetic construct
  REGION 1..65: note = Synthetic
DKEEELIKELVRLIEKAGNPHAALALLYVKVLRRNDPELARLLKKIAKKITKDPRFVEELRELAR

SEQ ID NO: 1557 - protein, 65 aa, synthetic construct
  REGION 1..65: note = Synthetic
ADWRWWIIIIDTTDPKQQKKVEDKARKLAKKIKKDAERSGLDVKVQVRSWTANGRFTVVVQSAVQ

SEQ ID NO: 1558 - protein, 65 aa, synthetic construct
  REGION 1..65: note = Synthetic
GDIDVVTIIVDSTDPDSQKKAEDTLKKISKKAEKKARKLGKSVSYKINSDTFNGLYVVQIWVEVE

SEQ ID NO: 1559 - protein, 65 aa, synthetic construct
  REGION 1..65: note = Synthetic
DQIVVVVIIYNGDVEVEYYRYGTDEEAEKKLKKLIKDWKRKARKLGGSVTIFVLNGDKSRRWHVQ

SEQ ID NO: 1560 - protein, 21 aa, synthetic construct
  REGION 1..21: note = Synthetic
MSHHHHHHHHSENLYFQSGGG

SEQ ID NO: 1561 - protein, 62 aa, synthetic construct
DHWEEVFRNALEHLQEATQQNDPQKAKKILEEAHKKLRRELSEEEARSVVRWLKQLVDREKS

SEQ ID NO: 1562 - protein, 63 aa, synthetic construct
SLDEAKKLLQEAEKLARKLNDRTELAYVEFLKHSLETAKKQNDKRTIESVRDMARDALEELQS

SEQ ID NO: 1563 - protein, 62 aa, synthetic construct
GDRRKEMDKVYRTAYKRITSTPDKEKRKEVVKEATEQLRRIAKDEEEKKKAAYMISFLKTLG

SEQ ID NO: 1564 - protein, 54 aa, synthetic construct
SQHEKFAEWMLRKIEEAIKRGNKISAEFLINLAKNFTRDPELKRRLERLERQLH

SEQ ID NO: 1565 - protein, 54 aa, synthetic construct
SQHEKFAEWMLRKIEEAIKRGNKISAEFLINLAKNQTRDPELKRRLERLERQLH

SEQ ID NO: 1566 - protein, 65 aa, synthetic construct
DDERLATDAFRSLIKRAGVKNLDVKVTNGKVRVTITGRDQASQKALQKVFALARRLGLQVQIDTR

SEQ ID NO: 1567 - protein, 61 aa, synthetic construct
SEQDKQVKKLTDIQREAYKHNDKETIEKALRTAASFARQHRDPKFRELFRIIHQLRQRVER

SEQ ID NO: 1568 - protein, 60 aa, synthetic construct
RDEIKERIKKAVVRARVTGNPEQLKEAKKLLEKLKKNGRDDQDAKKFEKAIRQVEKRLRS

SEQ ID NO: 1569 - protein, 60 aa, synthetic construct
RDEIKERIKKAVVRARVTGNPEQLKEAKKLLEKLKKNGRLDQDYKKFEKAIRQVEKRLRS

SEQ ID NO: 1570 - protein, 60 aa, synthetic construct
RDEIKERIKKAVVRARVTGNPEQLKEAKKLLEKLKKNGRDDQDYKKFEKAIRQVEKRLRS

SEQ ID NO: 1571 - protein, 15 aa, synthetic construct
GLNDIFEAQKIEWHE

SEQ ID NO: 1572 - protein, 20 aa, synthetic construct
METDTLLLWVLLLWVPGSTG

SEQ ID NO: 1573 - protein, 33 aa, synthetic construct
GSENLYFQGSHHHHHHGSGLNDIFEAQKIEWHE

SEQ ID NO: 1574 - protein, 4 aa, synthetic construct
GGGS
